United States Patent Application Publication US 2020/0377945 A1 - sequence listing, part 15

SEQ ID NO: 3064 - DNA, 33408 bp, Unknown
  gut microbiota DNA sequence
atgagaaataactccgttcctttttatttctcataaattaattaattgagagtaaattagttatacaaaaaaacatgagaatatgagatatgaaactgaaaaatcttttctggtagaaaactaagttcaagttattcagcttatagattttaagagagatgccatccccaaaaaaagatctaccgtaagggacaggaagatacctgcctgaagacatataacaaattatcttcagacaggcaaaccacatccctacggtaaaacattacttagttttttgacgtatctccctgatttatcttatcaatgaaacaggaagaactgcggacgggtatataattggaactcttttactttaccggataagaatgagccttcgcgcactttcacccggaaagcagtaactttatatatctcctgcatatcaattatgatctgatgcggatgagaagctttcgctgtcgggtccgtatgccagaaggacgaaacatctccgtcgtataagttctcccctactcccagattctggtccgccagttcactgtctacatagacaactttccatttcgttttatcaatcacctgacctttatcatccagcaattccacttccgagatacaagcctgattgtcatccgtatacgaggaaagagtctcgatgcaaaaatgacggaaggttgcagcaacagggaaatcgaactgttgccactcgttcatttctttcaaagtaactttcagaatgatatccccttcgtcgagcgtaggagtacccgtaaccacacgaagctgtcccttctgataattcttgtctacaccgaggctgtcgagaatcggtcggtccagtccttgcagaacacggtttccggtatcttccatttcaaaaacgacaatctcattctccccttctttcaaccatggggcaggcagatataaagtctgttgaggaccgatattccaaaaacgcccgagcgatttaccatttacccagacagcccctttcccccaacggctcatatcaacgaaacagtcgcctttctgccgaacggtaaatattcccttatggaaagcaggttttccctggatactttcgccaaagttcatttccgaaactttctctttataaagcggcagaggagtgatagaccaacctgtcaacttttcatctccacacagcacctggttcgtaattcctttccggttgaacaaaatatcgggaccataattaacacgtcctgtattttctaccagtatctccagggtagcaggagctttctgtatatccagcattacattattctgattgtaacggcgatccagacttgccacttgctttccgtcaaccagaattacggcataatcacgcaaatcctgtataatcagtttctgtttgcctgccttgtttatggtagtctgatagtgtatgtaaccgaagtcgactcccagatcttccattgaaaggacattttccgattcggtagtctggtgaaaagcagcctgcaaaggagcactttctttcagttcaatcgttgcgaaggttgttgtcggattgtcggcgggaacctcgggcaatacggttccatgaggcagatgcttctgaatgacttccctgaaagcataatatttcgggtaacagtttccccattcacccagaggcgcgtcataatcatagctggtgggctgcggacgatatcctccagccgtattggcaccattcatgtaccagaaatttgttcctccgtggaacatatacatactaacggatacgccttgtcccaacatccaatcgagttgctcggcagggcgtttatagtcgactgtcgaatggcgctgtccccacacatcgaaccaggccggataaaattccgccacaaaatacggaccgcccggatgatatttatcgatgatcttaaagatatcttcgctgaacactccgttcaatgtcggcaatgcaccgtcgatgtgtccggcctcaacctgcccgccaccgtcgcaagtaaatagcggaacattgaatccggcatcttttatcatatcgcggagagttgccagatattctttatccgccgcatacgaaccgtactcgttttctacctgcaccattaatatgtttccgccgttattgaccgtcaacggggccagttgtttgccaagcgcttttatataacgttcgcaatactccaggaagcggggatctttgctgcggtagaccatgtccttttctttcaacaaccaggaaggataaccgccgaagtcccactcagcacaagcatacggacccggacggagaatcacatacaagccttcctcctgtgccagacgtacaaattcggcaacatccgcctgcccgctgaaatcaaactcaccgggctgtcgttcgtgaaagttccagaacacatagactgatattgtattcaatcccatggcacgtgcccttttcaaacggtcgcgccaatattcgtgaggaatacgggcgtagtgcatctcgccgcaaatcaactgcacatccttaccgtcaacattgaaagttccgccgtctatcttaatacgctctttagaggagcaagccaaaaacagaaacggcatgagcaaacccagtatgaacttataaagcctttgtcctttattcataatagatgattgttatatttttatttctatacctattgtacaaatgcatgccggaatttacttaccttattccagcctccacgggtaaagtcgggaacagccaccggagccgaaccattttccaaagagaggcgagtcaactcagccatgcaacaccactcggcgagatcatacacatccatatccaacggtaatccgttgcgcagacaatacaccagacgataatccatgatataatccataccaccatggccgcctacctttttggctgtttcttccagttcctgatgaatcggatgcttatatttgttcatcaattcccgtttcacatcttcgggcaaagaaccgtgcgcattcaggttttcatggttggcaacaacattcgtatctacctgttcggggcgcaggcaatattcctccaccggatatttgctggcatatccgtcagtgccgaccagttgatacatccggctatacgggcgtggcgtcattacgttatgctggatgagcattgtcttaccgttttccgtgcgaatgacagtagttgtctggtcaccgttctggaaatcttttacttcttcgcccgtggttttccggatatatgccggtccgttaaccgcctttgtatccacagccaccaatgtcttcatcctgtctccccgatgaatattgagtagttggcaagccgggccaatgccatgcgtcgcatagacatccccacgattgttgcgattataatccatacgccaattattccagtaagaagaccaataatcttccaaattatgaatataagcgccctcaacgtgcagaatctcgccgaaaactccttgctgtgccatgttcaatgttgtcagttcaaagaaatcatatacacagttttccagttgcatacagtgtttgcgggttctttcggaagtatttatcaaactccaaatctcctccaatgtcatggcagcgggaacttcgatagctacgtgtttgccatgttccatagcatacactcccatttccgcatggtgtttccagtcagtagccacatacacaaggtcaatatcatccctttcacacaactgtttccaggagttctcatcaccgtaataggtcatagcctccggcaaaccggcttccttgagaatgttctgggctttttccacacattcctgacgtatatcacacaaagccttgatttggatacccggaatatgtgtaaaacggacaacagctcccggaccacgcatccccagtccgataaatcccacgcgtaccgtgtccatcttgggagcagttagttgaatgacgtcctcctgccctgaaggacgttccggagtagccaccacaaggggatgcatggtgcttttcttctgcccgcaaccggaaaagcctacaagcagaagggtaatcattaaactgataaatatcctgttcataactttcattctttttacataaaacaatattacctgtcagtgaccttatttacaatttcttccaaagacattcgtggcgcatcgtccgccatgtgcaaattcttttccacccattcgcgttcccaatggaaataatcgggcgctttcgcttcctctccgcgaagcaacgcacgcaagtaatcgaagtaaacgagccaacgctccttataataggtgttcatcatgccggcccattctttataggcatagtcatgcaaattgtcttccgatgtcacatgttctccccaataggtaataagcatcatcaggttgtggaagttgttctttttctctgcgaccgtatttcctgcatctttggcctgttgctgccaagtgctcagacggaaaaacgggtcctgtgccaacaactcattttcggtatcgatcatcatcagaaatttggaaacttcctgctcaaatttctcaacttttttctcttgataggcagttatcatatcatagaacaccgaatcagcttcattggcaatgacttgtctcaggaagtgtatcagatcaatgcgataggtacgaacctcattaaattccggcattgccttggcaaaaaggaacgctgctttcttgtaaagatctctatcatacttcttagccagtctaccccaagaggaaaccgatttgagttcaagtgcgggacgtgcgcacaggatgttttcgggcggtccttcctgataaccgacttcactgctataaatagatttcaacatcatcttccaggcagtccgtatttcatcggtgatacgtccgtaacgggccgtaacataagattctatccattggtctacatccacccggtctttgtgccacaccagttcaagtaacaattcatacgtaacaggattgttgtttataccttcgggcaagatacctacccctttcatatacttcgcatattcgctattcgaggcacggtaaacttcatcggcaaaacgttgtaattttccgttgataccgggacgttcgccgaaatttgtaacagtagcccaaatgaaaggcgttccttcgtagcctttacgagtttcccagttattggtattctccccgaacaattcctgaaccaatacatagcgtttatccagcttttccagcaaacccggcttcgggttgtcctgccagccttgcaacacccagatagatccgggaaaatgtttctgcatcgttttttgtatagctcgtcctgcatctcccagcgctacgccgtccgtagctcctccctcatgaaaagggtcgccggagaagaaacggatgtccgaaccgtacaaacggcgggtttcgtcataaaagatggctgcaacacgatcgaactccgggtccataggatccagaatatccgggcgggtgaaagcaccccaagttccttgcggaatgatatgcgccttactcttgtttttcaggttgctcggcaccattccgtagaatccgggcattaacggctcaatccccaatgacttcatacgcttcagcattttctgcaccagtttcttccgactgtctatctgtgactgaggcatagggccaccccaaccttcgatatttcccattagccaccaggcattataagccggtccggtgataaaatcggcaatctctttttccgagtagttcatccggcggagcgtgttttgccatacagcttccgagccgttggctacaagcatcaggttcacgccgttgagtgccatccagtcaagttcccattgccagtcgtcccagtcataaaagctcatggtataattgaaagtacagtagttcagcgcatagcgatatatagatgtggttttgactgttacaggttgtccgatgaccggaagctcagtaacgggggcgagctggtcacctagatgagacatactgcggtggcaataatatttcagataccagttgacaccgactgccgccgcatttgctcccgtggcctgtaccaccaatttcttgccgacagtctgcaatatgaaacaatcaccgtccgaagacgcaatttccttgaattgaatatgttttcccagccatgggacacggcgggacacaagttcgcgtacgccatcgaacgtagcggcatagccagtgcctactacacacagcagcacgaaaagaacagaaaagaattgttttagtattttcatggtttgtatatttaaactagtgaaaaggcggacactttattgatctgcacctatgttaatacgatgattatcacaacgcttatcgccgtcaatgtcgaacattccccggacatagccctgaaatatgagtcctgtccctatcgccggcgaagaggatttcaaatgtaagtcaggttgttgtagccgggtacttttcaatagtggatctacatcgaacactgatgtcttatcaccacttacagcctgccaggcggaaaagtcggtgtactccttaccatcccatatccatttatggttcttcttcgtgggtgagaaatagatattgccaccgatataattattctttcccgaagttgtgtatttgcggataaagatatcccggtcggatacggcataaatgatattattggcgattacattctcttcacacaactcggaaagacggatttccccttcgctgctgttatcccgatcattcactttgagataattgttcgtgccgtccagttggccgcctttgaggttgttattgaacagagtgttgttcacaacataacagtttttggtacttagtccgtcgaaaccgagataagctcccatatagataccggtacggaagttgttgtacacaaaattatcacgtacgatacagtccttggtctgcaacttgtaactttcactgcaaagcccgataccacggtcacattcgaaaacctcattctgctctacaatcgtgtttccgttgccgcacaggtatataccgatcgcgccgccattggatacggactggctccaatagtcctgcgatttttcgtgtgtacaacggtatactttattgcgacgcactaccccgttgcgtgcataattgaccgaaatatcgcctttggggttcagattatctcctcccgcaatgatgataccgatattctccacatcgtgtacttcattgtcctgaatggtgaagtcgaccacattgcctgccaatgtaaaggcttcacttgtgccgctatgaatttcgaagatttcacacttctctatcagcaggttgcgaattggcgtgttgtcatccgtacctaagaccagaattgcgtgcgcgctgcgccagtcaccttttgcgtcaactaacgggcagtcattctttatatcatatactttgcatccccggaatgttatgttaccggacgttccggttatataaattccttccggatctgtgttgttctccgaatcgtgggcatggcagatatgcaagttctcaaattgcatatagtctatattattgacctgtaccagtgcattgccccatcctttgacatacaggtcggaaccgtctattttagcaatttcaccaggataacttttcaacgttatcatcttgccgggttttcctgaacgtgtcggaacgacaaactctccgtatgatccctcccgcaagaaaacggtatcaccaggattgacacgctgcagtgctgcggctattgtttttaaaggttttcttttacttccattattcgcatcattaccagtcggagccacataccaatgggcagaagcagctccgcatgctaacaagctaaatagaagaaagcttatgagcgaacaaaaactttttctcatttctatttggctttaattgaatatctttgaatttaatctataatctgttttattactgatcggctcctatgctgatatttgttccattgtaacgtgcattaccatcaatatcatagctacctacgaaataggcggcaatgaaataaccggcgttcttagcgggcgatcctgattgtaagtgcaaatcaggagcggatatgtcaagactcaccaatttcggatcgacattataaagcgagttctcatctccgctggctttctgccatgaagagaaattcgtatattctacactatcccaaaaccacttgtgattggcagaagtcggagaataatagagattgtagccgattttgttcttgctaccggaccgggtgtatttacggacaaaaatatccctatcggtcacagcataaatgaggttgttcattattgtattattagtacaattctcagccaggcgaatctcaccctcgctatccttttcatcattgatattttccgaattattgcttccgttcaacgcaccgccaaccaggttattgtgatagagcgtgttatttacaacataacatccggacgtacctcctaccgtgtatccgatataatcgcccaggtaaattcccgtacgatagttgttgtaaacaaaattattacgcacaatacaatctttggtagccagcacattactctcgctaaccaaaccgatagcacggtcacattcccacacgatattctgctcgataatagtacttgcacctccgcaaacatagattccaatcgccccataagcggcaggattattataaacaccttcccaaaaatcctttgagacctgatgagagcaccgatataccttgtttcgtctcaccactccgttacgcgcataatttacggatatattaccacctgcattcaagttgtctcctccggccacaataataccgatattctcgacatcatgtacttcgcaatcctgtatggtaaaaccgtcaacattcccggcaatagtcagcgtttcactggttccggtatgcatatcgtagatttcgcatttttcaattgtcagattacgtatcggtgtgccgttatcatctcctatgactagaaacgcatgcgcactacgccagtcaccgttgttatgtcctgcaagacaagtactttttatattataaaccttacagttacggaaagtgatgtctcttgacactccattgatatataccccttccgggtcggtattaacatccgaattcgtagcattgcagatatgcaggttttcaaaagtcatatattggacacttttcagttgcaccaatgcactgaaccaacctttgatcgtcattccggtcccatcaatcttagcagtttcgcccggataactttttaatgttatcagttttcctttttcccctgaacgagtaggagtgacaaactcatggtatgcaccctcccggagaaaaatcgtatcaccgggattgacacgcaacaatgcctttgaaatacttttcagaggactgtccagagtaccactgtttccatcgttgcctgtggtagccacataccagcttaccggttcattgccggaagggttatcaggactttccggttcatcccctccatttccaccttgttcttttcccggttcatccggtagttccttatcatcgttgccacacgcgctaagcccgatgaacaaggtaagagccaatagaatcattttctttctcatttgtacttcttttaaataccctattaaaaactgaaaaacagaagaggcggcttaaagatgcagaagcactcctccccgcctcattcccccttaattattcataaactatcttccttatcacattatttttcttatcgtagacataaatcacaccatttttatctacggcaaggtcctgaggtcctgagaaagcggcagagccggcattagcatccacatatcctgcctgagtgccacctgcaaccaagcgtaccactctgtttgtcatatcgagcaggcgaatactttggtcaagattctctccaccgtcccacgcaccattaccagctacgtagatatcaccgttcgaatcaatagctaaatcagacgggaatgtaaagagtgcatcctcaaaagatccgttcagatagcccgatgttcctttacctatcaaattctctgcttcccaagtaccagctttgaattttacaatgccattcagaatctggtcggctgcatacaaattaccttccttatccacaacaatccctctaaaattaccggtagttatctgggtagatccctctgccgtccatttgtaaataccactactggacgatacaaaaatatctccattgcgtttatctacggtcaggaaccaaggttcaaagtctgtttctccaagtgtagttgtcactccttcaggtgttattttcctgattttccattcgaacacatcggtcagaattatatttccttccgcatcgcaatccattccgtaaagtccgttaaagcgtgcctgtactcctgttccgtcaatgcaacctttatttccggccagtcctgccaaagtcgtgacagttccgtcaggagtaatcttacggacacagtagttgacgcagtcgcctacatacacatttccgtcatcatctacgcaaacagaacctttcttccagtcttcagccggctctgctttggcagcgtcaaagaaaaacagtgcctcacttccaactccatcctgatatcccggttcgccattggcactacctgccaacgtagtgactaccgcagagaatgaataagtaaacttctcgatagtacgaacgggttcccggttggcaatagtaatagtaagctctccgtcccccaatttaggagggacgatagccagaatgttgttcatactgcaattaagcactttcaaaggaatgtttcctaaagttaccgagatatcttccggattctcagaaaaattctttccggtaatcagaatttccgttccggcactaccgctagtcggataaaaacgattcacaactaccggactaccagcatcgtgcccgtcatcgtctttacaactgctaaatagatttacactacctatcagtaaaatcaaaattatatattgaatagtgttcagtttcataagacttatcatttttctacggttgttattttctttacacaattattccgccggtctaatacatataccgtaccgtccttatcgacacagacagaagaaggcgcaccaaaggcggctggcaggctttcaagcgctgaattgacacctgcataagaaagcacttcaaagctgctatccgtatttccggaagttccggaaccggcaaatgtggtaaccattcccgttttctggtctatataccgaatactttggtcggcactaactgtcgaagcttctgctgtaccattacctgctaccaagatattaccgtctgccgtaactgctattccccacggagaagtaaaggtcgcttcattaaccggaccatcagcatatccgcttttgccggtaccagctattacaataggtgtatcccaacgatccttgacatatttaataatctggttagttccgatattggtaatatagagatcacccgtacgtttatcaatatccatacctccacaatttccagcacccgcaccggcaataatcaagttgcccacacttgccgggtcacctccataatcgttcaagtctttgagcaaaatatctccgtttgacttcatactgtaaagacgattgcttgcttcatcaatggccaaactaatggctgcctgataacccaaatacaatgcttttccatcaggctcgaaacatacggttgccccagtccaatcgtcacaaatgtacatattacctttgttatcaacctttaagtcagtaggacgtaccactgcattgtacgaacctgtacctccattatcataccgccaattaattccccagtctacatcatctgccgtacctgtacccgccatttctgtgacagtgccgtcagaagcgattttacgtacgcgcaaattacctatatccgtcaaataaacatttccattgtcatcggctgcgataccgccccggcggtattcccaatccgcacacataatattaaattcggaacttcccggcagagtggtaactgtacgctcgaacacgagttctttatattcaaaatctcccgtagtaagagttcttccgttaaaactgattacaataggatatgatccgaagtctgtttccggaatagtcaccaggaaatatccttcttcaactgtacaatcagcagctagcccattgtaggtagcggacggattcttgatttccgtcggtaagttctctacatagatacgtacctttgtcccaacctttccataagcaggagagtaacctgtaatggctgttttctgaaaaataaagttcacttccgattgagttgtcttcccatttgtcttaatgacaataggagccgttcctattgcttcattatccggaacttccaccaataactgctcttcattggaacgcagaatagataattgtacttcattaatactcacactgatagaagttgcatccaaaggaaactgttcaccgtttatcaataactgcgtacctccttttcctgtattcggagcaaaatcatagatagaaagttctccggcacgaggtgacaacgacttttcatcatcgtccgtacaaccggtgaaaatggttgctgccaaaataacaaccatagatatatagtatgaaattgttttcattatgctatcttattagttttatatttttcaggaaaattctaccaacccggattctgaaccaagccacgtccacggtcaatctctgtctgagcaatcgggtacaaatacatcttattatcccaatatctggtctgcaacaacttgcgttcatagaaaccttcaaaagcaaatccttgtccctgatcgtcagcaagtacattcatacgataaatcttgcgattctcttctttctcataaagtaaccggcgcgcaagcgtccagaaacggtcgccttcaaatgccagttcaatctgacgttcgcgaagaatccattcacgcattttttctttatcacccaaatcctgaggataggtaaccgtaatattcggaataccggcacgttcacgaatctcattaaaataagtgataatcttgggatcttccggattgtattcgttcatcgcttccatatagttcaataatatttcggcataacgaatatgaatatacgggcggtatactgcctgatcgttacggatactggaagaggtacttactttcttggctacattatacccggtgaagtcggtcatctgcgttcccgctcccgatgaaccggaatagtaatattcagctcttccgaatccatctttattcttgtcggaagaaaaataattgcggtcgtcaacagttatggcagagagcaccggacgtccgttataatgtacggaagcatagaaacgaggttcacgatcaacgtacatattcgattctcctttacggtatccccggttaatctcattacggacttttccgtattcgtccggatcatctttctgcgcaaatccttcttccgaataattctcgtcatcattgatatccagtccgtcacgagtcaaaaaagcatctacgatattctgcgttgcattctgcatactatatccgccattcttcgggttacaacgtttatcatatccccactgccagtctccagatttatgagtagcaaatataacttcagcatgattgccggacatgaacagttcgcggaaagacagatacgggtcaaattctctatcaccgctttctgtattgtgataaagatgataaatgcctagatcaatcacatcttcggcggcttcagcagcaattcgccacttttcctgatctttggtctgtggtgccaacaattctccgtccttattcttgaaatccttgaaacggggatttccattccagagttcactggctgccaacaaacgagcttgtgaaatcaccgccaaagcagcccccctcgtaggacgtcccagataagctgttgaggtccatacatccggcagtacattcaatgttgattccatcaagccacagacatactccacacattcgtcaaatggacggcgaacataattattgaaatcttcgtcttgctcggcaggtttctcgaaaataacaaacggtccatacagacgcaacagattccaatagaaccaaccacgcaagaaacgtgattccgccttatactgagtcttcaaatcagtacttaacacaccttccggaacacggtcgatgttttgctcgaatacaagcgctttctgaatacctcgataagcagcactccatttattatcacccaatgtattggaaggtccccagttgccttctaccatattacggacattcgtattagaaaagacacaggaggtttcatcagcaaaaccgaacacaaccggatcatcagtagacagccaaatatatccgtaaatgttatataaataagcttccgcctccacacgggtttcccaaatcatatccgtagttttcaggttctccggtttctggtccaaataatcacaagaagagactcctataatgccggcggacaacagcccgacagccaatatacggctaaatatttttttcattgttttcattgctttattagattaaaacgaaactctcattcccaatgtcaccatacgcgataacggatactttgccccattagaaccaagttccggatcccataacttgaatttagagaatgtcagcaagttttgtccggacagatagaaataaaggtattctattcctttatccattagtttcttgttctcaagcgtatatccgagcgaggcttgtttcaaacgtagataactgccatctttcaaccaatgcgtactattcacatagttgttgtcatttgttgttgcattagctgtcatacgcggataccatgcatctgcacgaggattgtccgccgtccagcgatctaatgctttggtgatgacattgctgggattcagtcccatgccggtgaaaggtacaataccgactccacttgctccccagtcaccgttgccggtatcaatagaaccaccattggccataatagatacatccgacactccctggaagaagagagccaagtcaaagttatgatagttgatattaaagcccataccgtatgaccaagaagggaaccaagacttgcccaaataacattggtcattagcgtcaatcacaccatcatcgttcaagtctttatacttgatgtcaccaggtgccagttcacgcatctgtctcggactctttttgatttcttcctcactctggaaataaccttcggctatatatccatagaactcgccataacgggtaccttcactcttttgataagcgtattgcatagccggttcgtcacggaacacaatcttattcttgctataagtcagattaccaaataaacgcaaccctactttgttaccgatacgggtctggtattccaaattcgcatctactcctttattatccatttcacccatattggcatagatagaggcgtcaaagcctgccatgctcggcaaagaagaacgttgaatcagaatatccttacgtctttcccaataataatccaatgtcaagttcaatttaccccaaagcatcatttccaaaccaatatttgtcttataagatttctcccaagtcagtttgtccgaccccagcagcgtctctctaataccgtatacgagatttccgttcggtccgaatccatagctgtttccgcttccgaactgagtaaaataagcaaaacggtctcctgtaccaccaatgttatcattacctacgataccataagaagcacgcaatttcaacaagtctaccgtacgagtcatattcttgaaaaacggttcgtttgaaatgacccaacccacagaagcagccgggaagaaaccgaaacgatgtccgggagcaaagttctccgaaccggtgtaagaaccgttcacctctgctaaatagcgttctttatatccgtagccgaaacgggcagcaatcgcctgattacgatatggaatagaagcaatggcacttccggcagtagcaatcatacggttacgcatattataaagcaccattccatttacgttatgatgaccgaaagtgcgatcatatgagatattggcttcagtataaataactctttctcccgtatcgctatgttcataataaagttcatcagaaccttccttgatcggtttaccaaagacaagttctccgtttccgtcacgctggttggtataccataagtctacccctccggtacgcttattattgaactcactataactgtcaaaagagaaacgagcataagccgaaagtcctttggttatgaaatctaatttttggttgacggtaaataccgattgcaaagccggacggaaagtatcagtgtacccgctgttctgcacttcgttcatcggattggaaccagcattggccggaggacctgcccaacgcccgtccggatagcgaacaggaaaagcaaccggtgaagttgagaaagcttcataccatagtttgttagaagcgatacccggataacgcgaatctgtcataatagccgacaggttcatctgtaataaagtagtttttgtaatgttcacgtctacgttactacggaaatcataacgcttataattcaggttcgggtcatacccgttttccttctttacattatattgtcctccctggttatagaaagaagcggacaagtagtatcgaaccaagtcgctaccaccactaatattcaggttgacattagatacagatgaaacattcttataaatcttatcgatccaatccacattcggatataagtaaggatccagtccgctctcggtttttaatatctgttcacgggaatatacctcactcagtcccgagtttcgacgactttcattatataacatcatataatcaacaccactcaacatctccggaactttagtgaagttggtaaaacccgtttctgcctttatggagattttaggcttacctaccgacccgcgtttagtagtaataatcatcacaccgttagcacctttcgcaccatatacagcagtagcagaagcatctttcaagagagagatactaacgatatcttccgggtcaatattgttgtaagcacctccataagtggagttcacatcgtcacgctgcacaccgtctacaattaccaatggagatgtatttcccgtgaaagtaccgattccacgaattgtaaaggtcgagttatcatatcccggttcaccactggactgtacggaaataatacctgcaaccttaccttgcaaagcattgctaagattggcaactggagttttcaggcttcctatattcaccgaagctaccgatccggtcatcgtcactttcttctgagcaccgtatgccacaaccactacctcttccagactggaagtagcttcttccaaagagacattaatagtagtctgattgcccactttgatattcctgggttcatatcccataaaacggaattccaattctgactgattatcaggaactgttatcatgtaaaatccatcaatatcagtaattacaccagtagtagcatttgccaattttacgctcgcccccggaatcgactcaccggtagtagtggtgacattacctttgatggtacgtgacttttttgtattgacagactgttcctcttttgccggaaacaaaagaatctgtttgccctgaattttccaagaaattccttttcccttaaaagcctgttctaaagcaacattaattgattgtttattaacggatacagtgattcgctgattcgttttaagttgattatctttgtaaagaaatgaataaccactctgggtctgaaccgcttctacaaactgtttcagcgtaacatttttcatattcagagtcaacaaatctgattgttgtgcctgcgcctggagcgatataaaaaacagtagaaataatatttgccaggtacaaagtcttagcttccccaaaaaggataaaggtaaaataaaacctctcattccctttgggattgaaatatttttcataaatttgcaatttaaaattaataattggtagagttaattttaatctggataggattggaaaacgggaattttccgatcctttttctttttcaagttgtgttcatcatctttctttttaggattagcattttttagtttatcataatattaggctgcctatttctttttttatttcggagtcaccaaataggttccatccggttgctgttgataatgaatgggagtaatcaaatcaatcgtctcaaaaatattctccagagattggtctatgtcaaaacgccctgagaatatttctgctttcaattcctcaccttcaatacgaatctccgtatgataacgtttactcaacataaacattacattttccattttttgagattcaatattcatatatttatctttccacgtagtatagagttgaaggtcgacatggcggacctcaataccggattgccggctgacacgccccatttccccgggtcgtaagattactccgtcttctgccttgttgcgctcgttcaactttaccgaaccggattccaagactacttctgccatattatcctcttccgatactcttacgtcaaaacgggttccgagcacctttacttctacaagctccgtaacgacctgaaatgttcttccattgtcttttttcacatcaaagaaggcttcaccgtccaagtacacttcccgattacgtgcagataacttatcagggtatttcaagctcgaaccaccccccagccaaaccttagagttatcgggaagcgtgaacagcaaggcttcttttccttggttcatcacaatcagcatatccggtttagcccaaagctgataacccaatacaccacccaacacacataggacagcaatactggctgccacggcacaacgacggataatcaacttcaatcgtggctttctgtttgctttcataccggattctaccttgctccaagtacggttcattacttcttccacttgccgtgtatccatattcaccaatgagtcatccaccagctgagaagcacgctgcaaagaagtatcttcttttaacatctgctccagtgcctctgcttcctctttacttaaagaatgatcagttcttttagcaagcaagtcccatatactactattctctttcatctttttacaaatattattaagcgcttctatatataaagacagaaataaaactcaaaatacgtagttgaaatcaaataaaaagttacttttgcaaataaatattgttaatagacgcttctacattataattttttattgtaaaaaccttataatcaaattcttgaatatgccacataaagaggatgacattagttatctattaagtcaaattagtgagggtaactcctcctgctttgaaaaaatgtacaagcggtacttcaaaaaatgctattctattgcattatatttcgttcagtccacttcttcggccgaagatgtgctgtccgacgtctttctcactctatggcataaacgtgagaacttgaaggatgtgaaagattgggattcttacttatttataacaaccaagaatcatgctatcacatttttggagaaaaaccatcaggataacttaagttctattgaccaaatcatcatagagataccggaaaacgacctcacgccggaagaaaagttactcaagaaagatatggaagaatgtatgcagcaagctatccggcaactgcctgagaaaaccagaattgtttattgtatggcaaaagaagaccacatgagctataaacaaatcagtgaagcactggatatatccgaaaggactgtcaatacacacatgactacagctattcgcagactgacggaaaacctgcaaaaatactttagataaattcggccaactataataaggaagctatcaaactaaaaaatcatcactaaaaaagggagactttacgcccccctttccggttactataaaatcattctggataatatttgctctatttcagctaactcttcggacgtaaactccaaatgctccaatgctttcaggttatcagccaactgattcacggaactagctcctactatcaccgacgtcattcgttcatctctcagtacccatgccaacgccatttcagccaacgtctgcccacggcgatgggctatttcattcagttgccgggcagcttctattttctccggtgtcacctgcgagcgttgcaggaaaccggaagaacgggcagctcgcgaatgttccgggataccattcaggtatttgtccgtcaataatccctgcgccaaaggagagaaggcgataaaaccggaaccggatgctgcagcaaatggaaggatttcggcctcaaccgcccgatcgaacatactataccggtattggctaatcagacagggaacaccggccttcgccaacatttcataagcaatacgtgcttgttcgggaggatacttggatattccgatataaagagccttacctcgcttcacgatatcaatcaatgcctgaatcgtttcttccaccggagtgactccgtcataacgatgagtataaaagatatcgaaatactccaatcctgtacgacggagactttgatcaatacttgccatcagatttttacgggaactgttaccgccataaggtcctgcccacatttcatgtccggctttggaagagataatcatttcatcgcgatacccctgaaagttctctcttagaatccgcccgaagtttgtttcggcacttccgggaacaggaccgtagttatttgccaaatcgaaatgagtaataccgtgatcgaaagcatactttatcatatcggttgccatggtgaagtcatctacactgccgaagttatgccataatcctaaagaaataagaggtagtttcagaccactccgaccacaatatttatactgcatccgttcgtaacgttcggttgccggctgataagcgaatgaattatccataagattcacgatttatctttcctattacaaaaatcaatttttcttctacaaagaaaaggaaaaaagcctgcataaacaagaatcgggaaatatacttcatattattgaaatacatttcccgacataattaaacaacactaaaatcttcaaaactggaaataaatgaacggctgaatctccgagcttttcatttgaataactacataaatcaacactaccaacatcaatgcctttcccacaaacggcaggcgaataacacctcgacagactgcatcctcccaactatcaggagcaaaatgaagcaggaatccgagtaacattaatgcaaagactttccaataaccttccagcagttgcgggaatagttgcggacggaaggtagtaactatctgttttaacatatccattgaattttggaaatctgcattacgaaagaagatccagcagaaacaaacaaaatggaaggtaataatcaccccgaagacacgacgccagccatgactctgttctcctttcttacgtccggtgattgacatccacattttatgcaaagccagagcaatgccatgaaatgttccccaaagaacgaagttccaggaagccccatgccataatccacccaaaaacatggtgattatcaggttcagatactgacggaattttccttttcggttgcctcccaatgatatatacaagtagtctttcagccaactggataaagagatatgccagcgacgccaaaattctgtaatggaggccgacttataaggagaattaaagttcagattgaaatgaaatcccagcaataaggcaatgccgatagccatgtcactatatcctgagaagtcacaatagatttgtaaggcatatccatatactcccataaggttctcaacgcccgagtagagcgtcggattatcgaaaatacgttctacaaagttgacactgatataatcggagatgattgctttcttaaacaaaccggagaaaatcaggaagattccccgtccgaacatttcctgcgacacaaagaggggtttccggatttggggaataaaatcgcgggcacgaacgataggtcctgctaccaattgcgggaagaaagacacatagaaggcatagtccaacagacttgtcaatggttttatatctttccgataaacgtcgatcgtataactcaacgactggaaagtaaagaatgagatccctacaggcaggaatatatcaagtgccgtaaactcccctcccataagggaagcaatcactccgcccaggaaattcgtatatttgaaataagcgagaagtcccagattgacactaagactcaaaactaccagccctttacgcttccaatagccttcggcacgcgccatgagctgcgccaaaaagaaatcgcaaaccgtgacaagagcaagcaggaagaagtaggtgccgctactcttataatagaagtaataagaaaagagggtgacaaacaggatgcgggcagtgtgtttatgctgcaacagcacatacaccaccaggaaagcggtaaacaaccaaaggaagatgccgctactgaatatcatcggtgcctgcgggtcataagtaagcacctctttgatccggctgaaatctatatcaatgggaaacatagtcattataagcgttgattaaggcctggtataataaatttccttgcaggatatatccctcaggcagataatgcacgtgatcgggacgcatcagtttggcttccgtccagttgacacaagcacgacgtttaccacccactacatcgtacatatcccataccagcagacggtgttctttggcataacgccgaatggtttcggacgctgttgccgtgcggggattgacagcgtaagtgcggcgtctccgccgttgccggaaactttcgtaagaaccgggaggggtagtcagtaaaatggatacgttaggaaggctatcctgcaataaattaacaagttcgtccatttggttataatgtacattgacattatagcgccggttgtgactctcgtttgtgccgaaagagagaatcaacagttcgggtttcagggcggcaatctcggcgatacggtccggatgagtaaaagtaaggcaagtagcaccgttcactcccttgtctatgtaggagactgctccgaatgtttctatcaatcgggcacccgtagtctgcggatagatatgtccacgcacatggctatcgccgatatgaacaatacggaccgtatcttccgacaatccggcacgcacctggcggagccgttcaaatacgggagtcaataaagcaatgctgtcgacaatctcatttcttcccattccgcggaaagcggcagggaaagaaaactgtacagagacagtatcattcgcccagttcatctccctcaagggtttgattgttttctgtttctttccgggaggggggcaggcgggaatccggtcttgtgccgccaactccgaaagagagaagggggcgcccaatattcctataagcgtaaggatgagaatgaaaccgggcaggtgtttactctttctcataagcacgcctcctgtcgtattgttccttaccgtatatcaatgtctcatatagcaatcccgccagatgtttgccaccacggaagttgatatgtgtataatcgtagttcgccattgaaggtttggcgtgtaccagtttcgccatacttccctctcctcccatagcctcaaacatattccagaaagcgataccactttcagcagcaatattctgctgataacgaatcaagttctttactcccggcatagtacggagatcaccggtttcggttttatagtcccggtcgccgacactcagcaataaaattcccgcttgcgggaaacattctttcaaatggttgatagccgtaagtaatcctttttgatagttgtcatagttccggccacgctcggtagctacattcaatccatattcaagaatgatcaaatcataaggacgttgctcgttgaactgcctcaacatctgcttcggaatgccacgcaaggacaaacccgaactgccgcgcagcgagaagttatcgagaatgattccctgctttccgtccattgccaatccatagaaaagagtagaatctgcacggtccaccgaccagcgtatggaaccgatacgcccgttcacctgtattttttgcagatggccggaagcacctaaagaatagctccggctttctccccggttcacacgggcggagagttgcacggaatctctgttatagaagaagatagaagcctgttggcaggtatcaagcagagaagcgtatttattctgtccccgcaactcaacatacgccccgctgcgaggaataaaataatggccggagatgccttgtttcttccggtcgaagtatactgtatccattaccgaatgactggaccaaccgccgaatgtatgccgcaccgtaggacggtaaccgcttgtcatggaagtaattgtaacgaaacctaccccgcagcctccgaaacgtttttggaacatttcacgtaagtcagctgtcataatatccgcttctataaaagaatcaccgaatacagcgatacggacaagtttatcatccgcatcagaatcagaagaagaaggggaagatgaaaggcggtcgagggcttcataaaaaggagccataccgcgctgggtagagtcactataatcttcgatgcaagtcatgccggcacggcaggtatccacaaaagccggttttatgacaggaggcaaaggaatactgtccgagtcggctactgccgtttccggttccggataacggaggtcacccaggatatcgacgcgcctcatcgtgtgtccgtcgatcgttatagccggaagccagtgaagcccgaataaggcgacaaacacagtcagcacaagccataacgaatatttcaaataattctttataatctccatttcaccaatagatataagcaccttttttagtccttggccttacctgatgccgagagaggctcatcggcgccggagcacaagctcaatggtgctttgacattttcaggctgcaaagatagagaaaagcaagaaaaaagaagggagaatctacattatttatgagattctccctcttagttatttatttaccggacaattatcagatcgtccgttcaatattccatacaaatgcacgtaatcccaactgttcagtctgcaaatccattttgtgcagtgtatccaacaacgggtctactttactgtcatcgaccaccgtaaggatagccgaacacatactaggccatgcatggcttccaaaatgtgggtcaccagtcttggagccacgtccctgtaccttttcgaggtaagtaaatccgcggcaacccaaacggtcgagcaacgccatgattcgttcgtaataagcctggtcgaatgttattaatactgatttcatatttctttcctgttatttctttataatttcatctttgtggtcctggaagtaaacatctaattcgcgttgacgacgaagtttacgacgacggttcttgatacctgttcctgcaaatacgcaatacaaggtcggaatcagaaccaaggtcaatacggtagataccgtcaaaccaccgattacggcgattgccatcggactccacatttcggaaccctgtccgccgccgatagccatagggatcatacccaaaacggttgtcgcagtagtcatcaataccggacggagacgacttttaccagatgtcaccacagagtttatcaccgccatgcctcgctctcgacagagagtaatgtagtcaatgagcacgataccgttcttcaccacaataccaatcaacatgattcctcccaacaaactcattacactcaacgtactgcccgtgaagaacaatgccattaagacaccactaaacgcgaacggcagagagaacatgataatgaacggataagtcaatgattcgaactgtgccgccattacgataaatacaaggataacaatcaggataccgagtgtacccaaatcgcggaacgaatcctgctgatcttcgtacgacccggaaatctgaatcgtcacttcacccggaaggtccattttatcaatcaccttgttaccggcagcaactacatctcccaacggagcaccggagattacggcagaaacagtcacaatacgttcacggtctttacgttcaatggtaggaggcgcaaaacgttcgactacctttccgacatctttcacacgaacatattgtccctgtgcattgtaaataaggatattctccagactctccaaacttgtacggaattccggagcataacgcaccttgatatcatattcatccccatcttcacggtatttggaagcaactgcaccgttgatacgattacgcaaatagttaccgactgtcgcaaggttcaacccatgcatagccagtttctcacggtcgaagtcaacctgatattccggctggtaatcgctacggctgatgttaacttcagtcacgcccttcactttcagcagttcgcgtttcaaacgggctgccacactgtcggtcatcgtcatatcatatccgtatacctcaaagtcggcacttgcctgagcagacatacctgtattactacctccaaggattacctgagccttactgaactccggatatcctttcaagtcttcacgcatttcatcgcagactgcctccagggtaatgtcacgatcgcccgggtccaccaaactgatgttgaaagatataatgtgggaaccgttgtcctgcatggaagcccatgtattatcggagtcagcctgaccaactgtatagttacatactttcataatatccttatacttggtcatccactgattcgtcagtttctccgaaagttcctgcgctatctctttacgcgtaccaatcggcaactcaagctgtacggcaatacgggcattatcctgtgcggggaagaattccgtaccgatcccctttgcacacagcaagctgacaatgaagaaagcaatacatcccacgataacaatgggacgatgacgaaccgcccagttcaacatctttgcataccaagtatcgagtgcgtccagcgccttctctatcggagtgaaaaagagtttgaacatcttcgacggtttcttctgtaaacggagcaactgcgaacacagcatcggtgtcaacgacaatgccgccacggtggaaataaacatgatcgcacacatcatccaacccaactgtttgaaaagtacaccggacataccgcttaccattgtcagagggaagaacacggcaatcattgtcaacgtagaagcgattacggaaatagccacctcattcgtaccgtgcacagccgcctgtttcggatcggaaccacgctcaatatgcgttgtcacgttttcgagtaccacaatcgcatcatccaccaccataccgatagcaatagaaagggacgaaagcgagataatattaatcgtattcccggaaatagccagataaataaaggaggcaatcaacgaaagcggaatcgtgatacagataatcaaggttgcacgccagcgtcccaggaaaaggaacacgacaatgacaacgaacagcaaagcatacattacggtttccgccaaactatcaatcgtgttcaagatattgtcagacgtatcgacaatcactcccagcttcacgtcactcggcaagtttttctgcaaacggggaagtgcctcttctaccttgcgggagatttctaccgaattggcacccgattgtttctgaacaacaatcatagctccctgcacaccgttgttataggtttcctgcgcacgctcctctactgtatcgacgatacgagcaacgtcacgtagaaagatattggctccattatgcgtgccaaccactacatctgccaactggcgggaatcatcaaactctccttctacacgcaacgaatatgtctcgctaccgatatcgaagttacccccgggaatgttcttattttcagccccgataatggaactgatcgtttcgatactcaagttgtatgcttccagtttattggggtcacagtatacttggatctcacgctgaggtgcaccactgatagatactgtacccacaccgggaatacgtgccaagggattcaccacgcggtcgtccagaattttataaagtgccgactggctctctttcgcctggacggaaagcagtacgataggaatcatatccgtactgaacttgaagataatcggattctcgacatcgtcgggaagctgtgaacttaccatgtcaagcttgtcgcgtacatcattcgtcaggacgtctatatcattaccaaactcgaactccagtgttatcaatgacatattctctgaagaacgggaggtaatatgtttcaggttgctcaccgcgttcaacgtattttccaacgggcgagtcacattattttctatatccgaagcacttgcccccggataagcagtcattaccatgattgtattcgtatcaatatccggatacaagtcgataggtaacttggacaaagagaaaaggccaaagatcaccactgccagaaagcagagggaggtcataatcggtttcttaaccgcaccttcgtataaactcatatattataatgtgttaaggtgataaggtattatttttctacttctacttccacgccattcgccaaacgtgcctgaccggcaacgactacctgcgaattattgggcacaccggatttcaactcatactccgtccccatacgtctacccagctctaccttattataagatactttgccgtctttgtaaacatacacataacggtcacctgaaccggcttgcttcacgatagcaagatcgggaacaacgacattgtcggccgtaccgaagtttagcgttgcacgggcaaacattcccggacgaacacgctgatctctgttgtccagcttgatctctatcgggaaagtacgggttgcagcgtcgatagtcggataaatcaggttaatggtacctttaaatatctcgtcaccgtatacatccagttttacatctaccggcgcacctttcttcacttgcgtgaagtagctctcagatacattaatcatgagtttcaccggagtgatctgttctactaccagcacaggatttccaccgctatacatatctccgttatcatagttgcgggctgtgacaaccccattaataggacttactaaagaagtgttttccaacagattcttataggctgtgcgctgtacgtcgagctgcattttcgaagcatcccattctgatttggatgcaccgccgaccttgtacagttcgtccatacggttgaattctatttcctgattgtccagttgcaattttgtctgtttcagattggctgcgtccatttgtaccaatttctgacctttggatacacggtcgcccacttctacaaaaatctggtcgatacgcacaggagatgaaggtgcgatgttgttcttcgcttccgcctctactgttgccgtatattcctgaatctggtctacgggacgggctttcacatcggccacctttactttgggcttctcaaccacgtgttccgtagcagctttatcttttccacccgtacatgagcccataaccacggttaacagcagggctactaattggatactttttttcatattccttagttgtaatttttttagttgtctatctttattcttttcctagcaccttatcgagatctgccttagcaatcagataatcataaatggattggttataagtgagttgagcctgagtcagagatacttgcgaactgttcagttcgagcactgtacccttaccgacatcgtagcgtttgccggcaatcagtaccgccttctcagcctgcatcacgttttccttgttactgaccacctgctcagagctggcagccatgttgttgcggtaacttacgatttccatattcagctttctttccgtgtcaatgcggttccaatcaagttggcgcatctggatacgggcagattttactttcgtaaagttgcttgctttgtacaaaggaatgctcaagttgaacatcaggctggaactattactccaattatactcgaagaagttaatattcgggttgtacaaggactgatagttatatgagaaactcatcgacaacgtagggataaaacttgattttgcgaccttcaagctcttctccaacattttcatgttcaagtccaactgcttcatggtagtgttattctccaatccgacttcttcatccttcagttgattggcaaatacagccgtttcataattcgtcagactgtcttctgttttaagttctacgtcggcggtaattcccattaacactttcaactgcaacttcgccagagtcaccccattggctgctgaaatcacattcggcttaatgctgcgcatctgtacctcggcactgatcttatcatattcactcactgcgccttgctcatatttggcattgacgatgttaaagttgtcttccgctagtttgtagcttcccagaagcacgtcgtagctgtcttgtgcgagcatcagttgataataggctttacttacctgattcaccaaatccagtttggaagcacgcgacttctctactgccagttcgatatccgtctttgtcatcgacattgtccgatagacagccggtgcaaacaaaggcaggttaatgcttagtccggcattggcggtgttcgttccgtcctgccccattttgaacgacatatcgttcagcttcatttcagccgctttaatcgtatggtccagcgaaccagcgatgcttgcttcaggcagcagactttgccacgcttctttgccggctacttttttcaaagcaatttcttctgccgccaccttcatcgtaggattctcatccaacgcaattgttaaggctttgtccaaggttaaggtcagtgtgtccttcgccgcttgtgcgttttgcgcttttgcaatgccaaatgcgcaaagtgcaacagttgccagaagtatcttcctacctgtcagtctcttcattctgttcataaaactagtttctaattgatcttttagttgtttgtctccggaacctcatcggtcgcttattctatgcggttcctacgatattctgatataaaatcttccagtactttcgcgcctttctccgtagagatgccgcgtatataggtaaacataatagactcatacacctctataaaggaatattcgttgcatacatctgtattcaacagcacatcgaactgctcgcgtaccagcaaattgacgattgcaaagttgacatccgaacggaaaatgccttgctccactcccaacataaaaaaggacatggttttctccgaatcactctcgctgcgctctttcatcatattatataccttcggatacttcttgatgtcttcaaaaaaacgcttgttcgtcttatgaaacatctcaatactcttttggaatacggcaagtatcacttccaacacattgtgggactgctcataaacttcctgtaaataccggtctctttctgcctgcaccgtcagtatacaatccttcagcaacgattccttatctacaaaaacttcataaagcgtacgtttggagatacctaatgctgctgcaatatcatccatcgtaatactcttaataccttttgtagtaaaagcctctgttgccgttgctataatccgttctttcaactccgcccgttgggaagcgtcttttccatgttctgtcatcgttcgttttctatttcattataatccagttttctgttttcccttgcatcgggaggaaaaacggaacaaagatatatagaaaactcaattaagaaatcaagtttccatttatttgtagcccatttgataaatattatcattcgttggacagaaatgaaaacaagtgttaagaggaaatacggaccaaacacagcacaaagataaagaggaaggagatgcgaggtaaagttttatcggtatcggaaggggtacacccgacaaaagccggataaatgtcgattaaaatcgacactcatccggcaacagcagtcaccattattaacgataaggtggaaaagggtctgtttattgtcagtattcaaactttgtccttttcagaaaagcgactgttttatgtatttctttgtacatcacgatatcatctttcacaaaaggtacttctttccggcaggtatggaggaaatgctccagaagcggtgacgttttcaacggacggcggaagtcgacaccttgtgcggcgttcatcagttcaatggcaaggataggttcgaggttgtccattaccttatagaaaatcataggaaatggcaagcggcaggtcgtggaagttaccaccagagataacttggcctgcaccgggacaagtgtgtagccacggtcgtgagttctccgtataccttctacaaaatccggataaggaggtagtgtattgccaagagttatcttcataataagcagaattaaagactacaaactgtaagcaatacagtttgataactctccgcaatgtaggaaaaaagaaagtaaaagacaagggaaatgatggatttattatcagaaaggtattatacctcatatatggcgtaccggaaccgccttatcataaatcgtaccacaaccgatagctatggcaaagaatcctctgccctatttctcttgactatcacgtagttttagcaaatagtcgaatgtgtcttttgcctcctggctgtcttccttcaggtaagcttgtttccattccgggtacttatccaatatttgaagcatcttatcttttccgagaaattcaatcttgcccgtttccccattcagttcataacaaacgcgtttggtcaccaagctcgaagcggcaagggcgtcaccgatatttcctccgagttttacatcgtcgtcttctacaaaattgccaccgataactgatcccaaaggcatggcacagaagtagatattcttgcctaactgaactgctggagcataccatgccccaaaacgcagtttcttatagcgcagcttgcgacagttcaaatataaatctccttcttcacttcgcactgcaaaacaacgtttcttcaagcggcggcacatagactcatcatcgcctgccgttatacggtagtcagccccgcctgtcaatacgatctgatttctagaacgtttctccacacgtagcactgctatggtgtctccattttgagcaagcaactctttcaagttggaatagataatattctgcgcaatcaacgggaggccaatcacgctcatcaacagccataagatacatctttttttcataagccttcctcctttcctttctaacgccttttcgagtggaaagttatacattttagcggataaatgcaaggacagaaaaagaaatattgaaaaaaagggtttttcttcaaatttgaaaaagagccccccaaaaaagtaactgaat

SEQ ID NO: 3065 - DNA, 901 bp, Unknown
  gut microbiota DNA sequence
ttgactttgccttcctgatgtgttatctttgtatctgttattacaaaatatatttctatttaatatgcaggtaaagggggaagcagtgtattctccctttttttatgtctgatcgtgccgaaagaagaaatcaccttttgtttttgaggaaatgcaggctctatttttataaaacggaggctctgttcgggtgaaacagaggcttcgttttactaaaacacaggctcaacattcattaagcgtggggttagcactcccaaagcgtagggttagtccccgtaaagcgtagggttagctctcataagtcgcgagattggctttgctattcctgcatcgaggatttacgagagctgaatgcatcatccggcagctctcattttcgcttcctattcgctttgcgttaataaacagtaaatctgctcttgacaaaaacaagctcatagcctgtccgttgttaaatatattacctttgcgcaaaaagtatcaaagcaattatggagaaactggaaaatataatctcaacctatcagcaaattattcaagagtcggaacaagctcttcagagggcccggaaacgcatctattatatcagccttctacgccttgtgctatttgtagaagccatagcggcagcctttatcttctggagcgacggctggttatctcttttcgtctttgccattctgccttttatatcatttatctggctggtaaaacgacataatctctggttttaccggaaagattatctgaaaaagaaaatagaaatcaacgaacaggagttacgggccattcaatatgatttttccgatttcgacagcggaaatgaatatatcgaccctgcgcatctctatacttatgacttggatgtattcggcgattattcgcttttccaatatat

SEQ ID NO: 3066 - DNA, 3124 bp, Unknown
  gut microbiota DNA sequence
tcgatcgaacaacgccaggaggctatccgggaattatcaaccgatctggaataccggcaacaaatccgtctgttcggattactttataaaggaaaacctgccgataccaacgaaatcagggaatgggcgggaagccccagctattaccggaagcatacgctactgcgtatcatcccgacagtagttagcatcatcaaccttatatgcataggttcggccattgtaggaattcttcctgccaccgtacccggaggtgtgtttttttgtttcgtcattttcagttctatcttttctaaaggtatcacaaaactgcaagcaacttacggcaaaaaattgcaaatcctctctacttatgctgaccaaattcttctcacagagaaaaaggaaatgaacagccctgttctgcaacagctcaaaacggaacttacaagccagaatcaaacagcttcccaggcagtccgccaactatcgaaactgatgaacgcgctcgatcaacgcagtaacctgttaatgagtacaatcctcaacggacttattttttgggaactgcgccaagtaatgcgaatcgagaaatggaaagaaactcatgcttccgacctcccccgctggatagaaacaatcggagaaatcgacgcctactgctctttagcaacgtttacatacaatcatccggattatatcttccccaaaatcagctctcaatcctttcatctgcgagccgaagctttgggccatccacttatgaaccgcaacaaatgtgtgcgaaacggaatagatatcgacaagcgtcctttctttatcatcataaccggcgccaacatggccggtaaaagtacttacctgcgtaccgtaggcatcaattatcttttagcctgcataggtgcaccggtttgggcaaagcaaatggaaatatatccggcacgcctcgtcaccagccttcgtacaagcgactcactcaccgataacgagtcttacttcttcgcagaactcaaacgtctgaaactaatcattgacaaactcgaagcaggagaggaacttttcatcatccttgatgaaatattgaaaggcaccaactctatggataaacaaaaaggctctttcgctctcatcaagcagtttatgaatatgaacgccaacggtatcatagctactcacgaccttctgctcggcaccttgatagaatccttcccacagaatatccgtaactactgtttcgaagcggacatcacgaacaacgaactcaccttctcttatcaaatgagaaacggagtcgcccaaaatatgaacgcttgtttcttaatgaaaaaaatggggatcgccgtcattgacgactaatccccactctttatcaaaaactaaagttgttccttcttctgtgtaacaatcttagctcaacagcttctaattcaaattactttttgaaagaaaagcgaccacagccgatgcatcttcattagtgaaataatgcactgatgttatcggctgataagtataaggtacaaactggaacagctgtacggcagcaaatttcttatcttcagaaagaattacgtccatacgaatgttcccacttgtttcgctcttaatatccgaattagcagagaacgaaccggaatttacaatatcaaccaacttatccatgtgcttcaaatcaaagaagacactgcgttcctttgcaatacttccggtcggtagataaacaacttcctttgacttccagaaaagacggaaaatacctacaaggaatagtcccgtcccgaacaccattaaagccatacttacagtagaggacctatcttccagttcaaaagtggaagcaaaagctaaaatacccaccaacaacatgaatgaagagaataaaactccggaaatacttgtacgcttagcgatatctggatgtgaagatgcgaatatagtagcatcaatagtttgagtagttgccataatatttaaaatttaatttattagtaataatataaagataaaaaggaccatcggtataaaatatatcgataaccataaaacaaataataccaataaatgaattctaaataataatatgccttaaagtaaatacatagtactcactcgacggctgacagtaataagaagttgtagtattataaattcgccccctatgctgtgacagagaattttcacggtcggcgcagcattgcagtaggttccttaaagtagtgaaatactctccaagctgtacacgctgaatacgtgtcactgatatctggtgactttgaagattgttcaattcagccactggagcataaggaaagtcaggagcactaatctgctcgtgttgtttcattgaatatgcaatggcaagttcagactgttccaccggtttctcagtgaaaacgttacttgctaccccatggagagtcaccgtaagcaacagaaacaatattacctttacaaattttgccatattctcctgcaaatataacagattctattcacgaaaagtttattcaggttatcttttaatttatcttaggattagtaaacaagtgaatatcattagggaatagacgtatactctatacggctcaattccaaaatctgctcctccttactcaaataaaaaggtatttacttcaaataaaaaggccactctttgcagagcagccttttctatatcgaataagaataactgtaaaattattcagctgattcagctttcggttcttcagttgcaggagcttcaacagcagcaggagcagcagtttcggcagcggcactcttcttagaacgacgagtacgtgtagctttcttagcaactttttccttagccatgtttgcattatagtctaccaactcaatgaagcacatttctgcattatcacccaaacggttaccagtcttgataatacgagtataaccacccggacgatcagcaatcttaactgagatttctttgaacagctctgttactgcaatcttatcttgcaagttgctaaatacgacacggcgagaattcgtagtatcttctttagacttggtaatcaaaggctcaacaaacttcttcaaagcttttgcctttgcaacagtcgtagtgattcttttgtgcttgatcaaagagcaagccatgttagataacatagcgctt

SEQ ID NO: 3067 - DNA, 6992 bp, Unknown
  gut microbiota DNA sequence
cttatcaccaaccatttttggcaacattacccacgatataatcaccctacaaacattgcatacgcgcaggaacacaaatttaaaacttacacttcctcccctttcagcgtagccgaactggcttccgtgacacgcacgttgacgaaatcaccgacacgatgcgtacccctatcgaacactacgacgcggttttgctccgtgcgaccgaacagttggtcgcgcgaacgcttggagactccttccacaagcacttcgtaagtttttccgatgcaacgctggttggactcagccgacaggcgattctgcaaagcgataatctcattcaggcggcggactttcacatcttcgggcacattgtcttcgagatgtttggaagcatacgttcccggacgttcggaatatttgaacatgaaagcagcatcgtatccgcactcttccatcagggagagcgagagagcgtggtcttcctccgtttcggagtggaaaccggagaatatatccgttgtcagtccgcaatcgggaatgatacgtttgatagcggccacacggtccagataccattctcgggtatatttgcggttcatcagtttcaggatacgggagctgccgctttgcacgggtaggtggatatgcttgcacacattgggcacttgcgcgatcacttccagcgtttcgtcactcatatccttcggatgagaggtagtgaaacggatgcgtactcccggagcagcttcggccaccgtgcggagcaacatcgggaaggtgacgatttcacctgtcggcttctcaaaacggtaggaattgacgttctgccccaaaagtgtgacttccttgtagccttttgccaccaagtccgacacttcgttgaggatactttccacgtcacggctgcgctcgcgtccacgggtgtagggcacgatacagtaggtacagaaattgttacagccacgcatgatagacacgaatccggagatatgattgccgcagatacgtgaaggaatcacatcccgataggtttcggtggtggaaagttcaacgttgattgccttctcgccggcttctacggcggcaatcagatcgggcaacgtcaagtaagcgtccggaccgaccacaagatcgacatgatgattcgttatcagatcatccttcactcgctcggccatgcagcccagtacccccacgatgagacgcttcttctttttcttcagcgagtggaaaaactccaggcgattcagaatcttctgttccgcattgtcgcggatcgaacaggtgttcataaacacggcatcagcctcctccagcgtttcagctacggagtaccccgccatttgcatcaccgaggcgatcacctcactgtcggccacattcatctggcagccgtaggtttcgataaacaacttcttgttgtcatcagcagttgcggatttaaagtccgctcccgttaattcgttcatattcaaatcttatttaaaaattcgactacaaagatacggcttcggtttttaataagtggtgaattgatacaaaaataacgcaaaaacttatagtctggcgggctaacttgtaattaatgttaagagaataaacattttccggtcagtttcttggcaaatttaattttatttttcacatttgtgcaatgaaagaaacattagattttttcatagttaaggtttaggttaaaaaaattaaggggagctgtgaagctgcccttttttcataactaaatgttagctcaaaccagataaaatgcctacctttggcggacaactatttagaagtgaagcaaaatggaagattttttgaaatttctcttgatagcaggtgtcattctcgtgggaatattcaaagaggtgaataaaaatagcaaatcgaagaaagctaaaaataaccgccccgtcccgccgacaccctctcccgtcgaagtagctcccgacgccactcctatgcccgaagcctggggcagacccaggtcgctggaagaactgtttcagccgattcccgcagagcagcggacgcgcaaaccgaaagtaaggcagcaggagtcgaaaccgaaaaagaaaaaagaagaagtatccgttgccgcctctatcgccaacagtgccgcacaggatgaacgaaacagccggcaaggtgcccactataacacttcccacgattcacatgacaacaaagaagacttcaccattcattctgctgaagaagcccggcgcgctattatctggggagaaatccttcaacggaagtattgacaagtgtcaggtgtaaagtattagatatcaactgtgtcaggtattaaacattgagcattacgattcgagtatcaggttccgccctgaatgtcaacatattgagcgaattattaaccaattaaatatcaactgtatttaacacgaaattgtactatttatgtcattcaatcgtatttcagcagcagaagctgcaagccttatcaaacatggctacaatatcggcctgagcggatttactcccgccggaacggccaaggctgtcacagccgagctagcaaaaatagctgaagcagaacatgccaagggaaacccttttcaggtaggtatctttacaggtgcatcgaccggtgaatcttgtgacggcgtactggcacgtgccaaagccattcgttaccgtgctccttacactaccaattccgatttccgcaaagctgtcaacaacggagaaattgcctacaacgacatacacctctcacaaatggcacaggaagtgcgttacggcttcatggggaaagtgaacgtagccattatcgaagcctgcgaactgactccggacggcaaaatctatctgacggctgccggcggtatctctccgactatctgccgtttggcagaccagatcatcgttgagctgaacagcgcgcacagcaaatcctgcatgggattgcacgatgtgtacgaaccactcgacccgccttaccgccgcgaaatacctatctacaagccgagcgaccgcatcggactgccttacatccaagtggatccgaagaaaatcgtaggcgtggtagagactaactggccggacgaagcgcgctctttcgccgctgccgacccgttgaccgacaaaatcggacagaatgttgccgacttccttgccgcagacatgaaacgcggtatcatcccgtcgaccttcctgccgttgcagtcgggcgtaggaaacatcgccaacgccgtactcggtgcgctgggacgtgacaaaacgattcccgcattcgaaatgtacactgaagttattcagaactccgtgatcggtttgattcgtgaaggacgtatcaaattcggcagcgcctgctcgctgactgtcaccaacgactgtctggaaggtatctacaatgacatggatttcttccgcgacaaactggtgctccgcccgtcggaaatctcaaacaacccggaagtagtacgccgtctcggtgttatctctatcaataccgcaatcgaagtcgacctgtacggcaacgtaaactcaactcatatcggcggtacgaagatgatgaacggtatcggcggttcgggcgactttacacgcaatgcttatatctctatctttacctgcccgtcagtagctaaggaaggtaagatcagcgctatcgtgccaatggtttcccacctcgaccacagcgaacactccgtgaatatcgttatcaccgaacaaggtgttgccgaccttcgtggcaagagcccgaaagaacgtgcacaggccattatcgaaaactgtgcacatcccgactacaaacagttactttgggattacctcaaactggccggcggcaaggcacagactccgcacgctattcaggctgcactgggcatgcacgcagaacttgccaagagcggtgatatgaagaacactaactgggccgaatacgcccgataatattccgattttctattcacctaagtctgaatataaaaagaatatgaaaaagatagctgtacacagtctgcttctccttattatattagggagcggcaggctgcaagcagtagccggtcctgctgataaaatccggaaaaatatcgaatgctatttcaacgactatctccgtggagaaacgcctttatatgaaaagcaccagtcattcagtcttctcaaagcatcggcctaccgccaattggtatgggaagcttggaaaacagccaacgatgagctggacgaagaaaagctaatcgccctggatacattatccgcttccagcaagggaaaatggcacctccccaaagaactggaacccaacgctatcatgccctattattgggggagcaagggcgcggaaaaacccgcagacggttatccgatgtatctctacatacacggttccggtcccaaacaggcggaatggaaaaccggcctgaacatctgttcgcgttttgacgacgctccttccgtctactttatcccgcaaatccccaacgaaggaggttactatcgctggtggcagaaagccaagcaatacgcttgggagaaactgttccgccaggcactagtatccgggcacgtcaatccggataaactgtttatcttcggaatatccgaaggtggatacggcagccagcgtcttgcctctttctacgccgactacctggccggggcaggtcccatggcaggcggagaacctttgaagaacgcccctgccgaaaactgcgctcacatcgccttctccctgcggaccggtgccgacgaccgcggcttctaccggaacatcctcaccggctacgtgaaggaggaatttgaacggctgcaaggtctgcatcccggactatacaagcatcacatagagctaatccccggcaaagggcattctatcgactatcgtcccaccactccgtggctgaaacagtatacccgcaacccttatccgaaatatgtctactgggaagactttgaaatggacggcttgcaccgcaaaggattctacaatctctttgtcaaagagcgcccgaatgacgatatcaatacccgtacccgctacgaaatgagcattacggacaaccacatcacactgaatgtggataatgtcgtttatgagaccgttcagaaagatccgaggtggggcattgaaatgaagttcaggaagaattacacgcctgccgccaaagggaaagtgattatttatctctgtgatgagctggttgacttgaagaaggaaatcactgttacagtgaatgggaaacaggcttttcagggaaaggtaaagccggacctgaagaatatggtgaacagttgtgccgcattctttgatccgcagcgcatctatcctgccgccattgaggtgacattataagccgataggcagagagaacgcctaacgcccgataatcacctcgcacaccttatcctggaaggctctggcctttgcagccgaaagcacattctggttcattatggcaaaggccacttcatgtccgttcttcatcttcagatagcctgcaagtgtattgatagctgtgaacgagcccgtcttggcatgaacattccggaatgtggctgcgcttttcatcctgtttttcaacgtaccgtctatgccgcctacgggaagagacttgtatagcatacggaacacttctgtccgggaatatgcatatttcaggaagtcaaccaacagagcgggggagaggtagttgtaattggagagtccgcaaccgtccgcaatcttatactctttcgggttatgtcccagctggcggatgagctgcatgatctcgacgattccgtcttcggcagccacctgcttcttccctgtcgcctgcgcgccaaggcggcagaggaatgcttcggcattcaggttatcgctctctttcattagttggttcaagacttcctgcacggaagtattccaacaggctatccgttccacttgcacactgtcacggggtaattcggcgaatccgtatgattggggagccgtaatacctttcccccgaagacgctcgaggaaagtgtgcataaagaaagcggaagaatcatagatgtttatatcatcctttctaatggaggtaacattgcccgaaacaaccagattatttccattcctcaaccaatctcttgagaaggagaactttccggcagaggaagtacgtgtctttgtccaattcgtcagggtataataggaggaaaccggtttacaggatatgcttgccgtatctccctgcacagcggaaggaaacacggaaatctgtaccgtgcctttacaaaacatcaacggagacaagtaaggctgataacctgcaggagtatcgtcccaagcccagccatgcccccaatagagcgagtctttcatcgaaacgtcgccatacacctgcccgttaatcacggagaaaggaaaagtcatcacttcctctatcaacgaatccattgcctgactgtcaaattcggggtcaaatccccctactacatacaggttgccttgcagtgtatcgtgctctatcacaccatcgtgccatacttccgtgcggaaaggctcatctgcatcaggacgggagagagcggtaatggccgtcaacagtttcatggtagaggcaggccgggagagcttgtctgcacggtagctatacaacggctttttcgccgtcaggtcataaacggatatgccgacttcggacgcttcgggaagcatctttttgataagtgaatctatttgggagaaatcccgctgtccccacaacggcaacagacagacggacaacgcaactaataaaagaacttttttcatacaatacaggttatgaatcgaatcacacccgcaaatatagcacttcccaactgaataagtctaaaatctgacaaaaaacaaaagagggtatctgaaagccggggtgacaggtggatgcacaatgctgataataaatgatttatgcatctacctaccacctccccctacgggtactcctccttcccggaggttgtgtaaaaagtaagcatcaagtgttctttgacatattgtataaaaaaggaaatgc

SEQ ID NO: 3068 - DNA, 522 bp, Unknown
  gut microbiota DNA sequence
ttccaccttcgctccacggacaaacttcgggtccagctcatagccttcgggatgagtgatgacaaaatccacatcggcctcgttcatccagtcggcaaacgagttgggaacggcctgaggcaatgcacgcggatgcggcgcccaagtcaagaccaccttgggacggtctttcttcttatactcctcgatagtaatcaggtcggcgaaagcctgcaacggatgaccggtagcggcttccatggagaatacaggcttgccggaatacttgatgaactgattcagaatcttttcggtataatcatcctcgcggttctcaaaatgagcgaacgaacgcacaccgatgatatcacaataagaagccatcaccggaatagcctccagtaaatgttcactcttgtcgccatccataatgacaccgcgctcagtttccagcttccatgcaccttggttcacatcaagcacaatcacatccatgcccaagttacgggctgccttctgggtgctcaaacgggtacgcagact

SEQ ID NO: 3069 - DNA, 13108 bp, Unknown
  gut microbiota DNA sequence
tttccgccggctgttatcggtgcagttgtttgtgtgtaccgggcaaagaaggtacagaaaggaggccgaaaatgacatcttattttatagagcttaacgaatataagccacagaatcgaaaatgtgctgaaatggcagagtttgcaaaccagtttggtaatacgctttgccctgataaaatttccttcgatgcttttaaaactgaactggaagcaaaggtaaaggagctgaacgagaaataccctaaaacaatgccgctgaagatatcttccggtagcgggtttattcatatagaccaggacactaaaacacataataacggctgtgacaagccggtagcctatttttttatttaccgggttaaaagaatatataggttttcagagcgtccccagatagaaaagaaaggaggtgccgaatgatatatactgaatatcagcaagtgttacttacccaattacaaaacaatgataaaagaattgaggaaataaagaaggaacaggaagaaatacaggggatgtttctacaagaaagtaaatttaaaccgggtgatctggtacaggttgattataaaataagtaatgctacttttaaagttcgtggctggattttccggattacattctggaggaattgcccgtattatcacctgaatttacccaagaaagatggttcccgcggattaagggttaaaagtgtatgcgacggggtactggaaagtataacaagtatttcacatattaaattagaagacttaaaaggaggtgtcagatgaatacaaataatcctgatatcctatttttcgttaaacgtgaatacggtacgccttccattgaattaagagcatataaagtggagaaggttaacaatgagtttgctttccttgaactggaacgtttgcggttggttgttttctccggtgattttcagtctgtatcacttcatcacgagtacggtaaaaacaactgtatgtataatagtgctaataatataccggatttgatgaaagacatgaagaggtggcagttatcgcccattgacagacgtaattatgaacgctttagaaaagtcgccctcgggatataccggcaggccggaataattgatttcactaccttagagactacaccgattaagaacgtttaaagaaagatttgttatgaaagacatagaagtaaacggcgcacatatcacagatgaaagtgccgaaatattgaagcagtggcaaattaagacagaaccggtttccgcttgttacatacgggtaatagaggaaacgatcgatgatttgaccgatgaagagagcgaacctctttctccggaaaaaattgtagggcgaatcaggactttacgtatgatgaaaaaagacatcgaaaagctgtctaatccttaatattaataatttagcataccggctgaaaaggcagccgttgggtttaagtcccaggttagggtttgtttgtgccggggtggttcccggcactcttttttatgtcctttttgtccgtgtccgttcttcccacctttgcagtaaccaatcattcaaattatgaaaataggaacggacaaatggaagcatttcgggattaattacgctatatgtgccctgttgggtgattatggtgttccctttgccctgggtgcttcattgggtaaggaatacggggataaaatgtcacccggtaataaatgggactggaaggatattctggcagacctggccgggatcgtggcgggctatttgacgcatgtatgtaccgtctggaccataatgtaaaattttcaactctatcaatatgacggaaacgataattacagcgattattacggctctttgcacgggtggactgacctggttattcactctccgatatacccgtaaacaggcggaagctgatgccatgaagtcagtacaagaggtttaccaggaactaatcgaggatatgaagaatgaccgtaaggagctaaagaacgcgtaccaggaacagaaaaaacggtttgacgaagtggacaacaagtacaaggaagtcctgcagaaatgtaacgaaatggaaaaggcaatcaagcagaacgcccgtgtaatggacactatgaagccgtttctttgcggtgtgaagaattgcccgaaccgtaaatctatcacttttgacactaataataattaacgacttaataagcatgagacatggaatcgtacacctacttatttttatttgttttgcagcttgtttttacggttgtcgttcttctcgctctgttacacgaaaaacggttacagaagcaactggagaagaaaaacaaacaactactgacggagttattgaacttgcgcggagagattcaagcaatgaggagcacgtacttgacgtttaccgggaagatagtacgcatatccgtatcaactacgacagcctcggaagaattaaagaaattgatttcagcaaccgaaaaactgaaaaaagaactggaaagaatcaaagcagttccttccaggatcataaggaaactaccagtcaagcggaaacagtcgttacccgtaaatccgacgttaagcaacaaagccaggaaaaagaaaaggttacaaacgggtgtagcttatggacgttcctaaaattcatgtttttctttctatccttttgcctggtccatgataactggggcaggattaaaagttttatccgccggctatggaaaaaataaacctttatgtagcggtagaacagatgaagcggattaccatttccgggggaaccttttctatcaagttccggaaatggaaccggcagacacgggacggcggcgacatagtgatactcacggccgcccgtttgaggaaaaaggcgacggatgaaagcatcgaaaattcaagctataaactatttctgacggacaccacaacgggccggccgctgaattgctgggaatgtttggtaatggagttcaacgggaaaagaataacgatttaagattatggaaataagacgaagtggtaactttggaattatagataccggcagtgacaagggcttgatctctttttctatcggtggccgcggtaaaggttgggaaccttccagcatccagttaaaccggcggggggctttcttttcgcggaagatcagcgtaaacggtacttttatcgttcccatgggtgataataacgacatgccgggcgaggtcatgcgtttactggataaattctacgccggtgaaggtattatgggtaaaatagccggtttacagtggggagaaggcccgcggctgtatgaggatgcaatcgacgaagacaataaccgtttttaccggcgttggaaactcgatccggaaataactaccgacctggagtcatgggattacacgacggttcttcatcgctcactcgtagacttaacacacatgcagggcttttttataaagtttgtccggaaccgtgcgccgcgtgtgggcaatcccgggcgtttggtacggctggaacatattccctatcagaaggcccgcctggtatatccccccgacggcgaggatgaaccgcaggaagtacttgtgggagactttccttatcctgatccggcttatacttaccgttacccggtctttgatccggcccacccgttcaaatatccggtttctgtgaaatactataatatctattccttttgcaaggatttcatgagtacgccgcgttttctgggtgcgcttgactggctggagcttgccggcggtctggccgctatcctaatcgcctataacgaaaacgcttcggctatttccctacatatcgaatcgccgcagtcttactgggaccgcgcggaagcacgtataaaacaagtttgcgaacgtacgggcgaaaaatacacggcccaaatgctggaagattttaaggacgaagctatggagaaattcgcctccaacattaccggaaggcagaacgccgggaaatacatgcacacgactaaattctggaatccggaagcgaataactttgagggctggacggtggagccgctggataagaagataaaggattatgtggacgcccaaattaagatatcaaataaggcggacgctgccgctacttccggcttcggtcttgatccggtactttcaaatctgattatagaaaacaagctctcttctggatcggagaaattatatagtctgaaagtgtataacgcttccgaaacggctattccggacatgatcctttgtaaaccgttacagcaatatattaatgccaattttccgggtaccactacgaaagtagggctttatcgtaccatagtagaagcggaacagaacgtttcaccctctaaccgtatgaaagaaaatgcgtagtctgtttttcacaccaaaaccggaagatgtgccggaagaaccggtaaacgaccggcaaccggaagagaaccgggccaatgatagcccggacaagcatataaaggcccgccggacgaaaaacgttcattttgaccggcgagtaaaatcggagctgcacctggaagagtgtttgccctggcattttgagaaaggggcagcttatcactgtatcagtcatggggacgttgacagccttacttatcttcgtgtgatcgtgaagcaacaaccggtagaatatgttctaatttctacctggtgtatggcaattaccgatgttaaggaggtggagaaatggctggagagaaaagacatagggcacgcggatttttatgtaggtgaaatttttcaaggttcctatgcggatgtttatttatacttaaagaaggtggcggaacgttttggatcacgtgtctgtatcttccgtaaccatgctaaagtaatggccggttttggtaatgcttttgattttgtaatagaaagctcggccaatataaacaccaatccgcgcacggagcagacctgtataacaatagataccgggctggcccgcttttataaggagttctacgatgaaataaataatttcacgaaagattttgataattggaaaccatatacactaaaaagagatcgagcaaatgacgaggttatttaataaaggcggtgacggggccggtgaaatagtccgtgttctgggattaatcgataatgatcttgattttaccaagtgggaacctatcttaccgctggggattcgggatttacaggctatcatcggaacggaacccatagacgcggtagataagtattaccgtgaagatcatgcggatgttagggaaacggacagcatggcggaaactttgcggctgatgcagcaggcggtggcgatgtttacctggttaaaggtcattcccactttggacgcacaacacggaacggccggacgtggaaaacatcttggagagaatgaaacgggtatgactgccttacaggagttcaaggatgaagagaatatccggaacctggcttatgaagccgtagacgcgttggtggagctactggaacgcgaaaagtttgatttctggataaacagcattaagaaaaaggctataaaccggcttcttattcagaataaggaaacgttcgatgaatattataatatcggaagtcatcggcttttcctggtgcttattcctatgatccgggaagtccaggacgggcagataatacctgttatcacccggagccgttataacaaactgattgaaggcgataccgttttaacggagaaattgctggagtatgtacgccgcccgcttgcacttctcaccataaaaaaggccgttgaacgtttaccggtggaagttctgcctaatggaatcgtacaggtacagcagagcacaaccgtacgagataaattgcgggcggaaaaagaggcccggcaatcggttgctaacagtctggagcaggacgcggcggcttacctggatgtattgcaggatatcattagggaactggatgcgcagtcggaaacggtggattattatataccgggtgttaccgtacaatccaggggaataactttttaatgtccggacatggagaagtttacatataatagtaagacggtggaggtcccttcctgtctggatgaagtcagcggtgagcagtaccgacagtttcttatattggcggtactgatgaaccgcggtacgatcagccccggacagttccgcgtaaaatggctttcttaccttctgggtatgaaagcggattacaccatgtaccggcgtgagatcatccgggagctggacgggcaactggaaaagctggacggctttttctcttatacaaccggtaaggagggcgagcggatcgttacgcccattctgaaaaccggtcgtaatctgatgcaggatttcgggggctggcatggtgtcggtgacatgctgaacggtcttactttcggtaacttttgtgattgcctggatttgttgcagcaaagcaagcaggcagcggcagaaaaggacgaaccgactataaatgaaatcttccaggatatcacgttaaagctttaccggtataaggacccggagaagataccggccgttccttccttgcttgccattcatgcggtaaacttcttttccgctgtttgggaaatggttctttccggaccggtttatatcggtggtgaagctatcgactttcggatattgtttcagaagctggcatccgaggaccggaaggcggacgataaaaccggctggaccgggatagtctttgaggtggcggcttccggtgtattcggtaataaaaaggaggtggacgatacgcccttctgggatgtattgctttatctgtataaatgtaaatttgagtatttgcaccaaaaacgtaacaagaaatgagaacgacaacaagaacaaaaaacaagatcaagaaatttgaagggttacgcctgaaagcgtatgtatgtgccgcgggagtatgtacgatcggttacggtcatacggccggcgtaaaaccgggtgatgttatcaccgaggcccaggccgatgctttctttgaatcggatatcagggcggtagaaaaccaggtaaacgcgcttccccttgatttgggacagtaccagtttgacgcggtagtaagcttttgctttaatgtaggtatcggaaaattaaagaaatcaacgctttataagaagatcagagcagatgcgtatgattcatccataccggcagagtttaaaaagtggatatacggaggcggtaagattcttccggggcttgttacccgccgtgaatgggaggcaaaacgttatcagggattgacaatatgatagatataaaggtttaccgtgaatactgggaaggcgtgcaaaaacgtattcctgaaataaagaaggtgctacccgttaccattgacgaggaaatgagtaagacgatacaggggctatcaaaagaagaatgtccggtgctctttattctgatcccgtcgggaacgggtgccagcctttcggctgataatgtgagggaaaataatttatgcgttattttccttatgagcaagtacgatccccaacgtaaaggggcttatgagactatcgaagaggtgcagccggttatggagcgtatcaaacaaatgctgatagaagattccgccaccggttgccctgtcactaaggaactggatttaaccagcctttccactcttccggaatccggcttttacaggacgtttgcagggtggagcctggctttctcatttaaaacaagatgctaatggatgcttttgcgtggttctggttagctgttataatatgtattattacaataggtgtaaatggtacattatgtacctattggagatataaatatacctctaacaagaaaaatgaaactgttaaggacgaacccggggaaaggcacattattaccggattttcaaaaaatgaataactgaatggccgagaattttaaaacggatttctttaccgaccggatcgggcgtggaatacaggacatatttcaagcccaacttgatatcgctaccaaacggatttaccagaaaggccgtgagcgtaggaaagtacagggaaccggggagatcatacaagggcgatccggtgcattaatggccgcactacagaacccgaattattcggtcattccggacggcgaaggagtaatcgcacattctaaccttccattatatacccgcttcctggatatgaagaaacacggtaattaccagatttataaccggcagatatacgggattctatatcatgacacactcgggaagattaaatatgaatatcaggattatgtaagggaaagggtaaaagaaatgtttgccagttcgctaaaataggtaataaaattaatacctaaatatttgtaggtaatgattttattacctatctttgtttcagtaaccaataaaacaaagtttatgcctgaaatttgtagattcttcggtattattatattcctctattggaaagatcataatccgccacatattcattttacttatggtgattatgaatgttctattagcgtattggatcggattgtagacggtcaggctccagctaaagttatcgcaaaagtaaatgagtggattaacttgcatgaagcagaaatactttctctttgggaaaaggcccaaaaaggggaaaaaataaataaaattgaaccattaaaataaacgcttatgttacgagttatagatgtggattatattaggaattacgagcttcttgttactttcagcgacgggagtaaaaagatcgtaaatttggaaccttatcttacaggtgaggttttcggggagttattggataaggaaaaatttgttcaatatggtttaacccgtgctactattgaatgggccaacggtgccgaccttgcaccggaatttttatatgaaattggtatagctgcataattttagactctatgaatgattgtttagctattcaagataagaaggaagaaactttcttatatcggatttttatttctcacccggaactaaatgcttctgcggtggctcgacgtatgggaataagtcaaagccttatgtctcaatatataagtggaataaaaaagccctcacaagaacgggaggccctaatagtaaatactattaaagatatcggtaaagaactaacgatgattgtatgacatacgaagatattttatttctcatcggctttttcctggtaatagcttttttcgtaggatgtaagcataaaccggctactttatccgggtggcttgcttttgcctttctttcctttatcgtgacgcctcttatatcagttcctttaacctggtacctttgccggatgcttgatcgggcaacgattaaggataaaggatattttgatccttcggaccttactttcaagaaatagaaatagttttctttttgtataataagcctgtagaatgatcctacgggctttttttatgtccttttctgacactttacaccaggataattttgccttataaaatttactcttatggcaaaattaaaacctgactatatcgaatgggtgttaactctgaatgcctccgatgcgcagaaagaaatacataaactttcagaaaagaacaaggagctccgggatagcaataaggagataaaaaaggctatgaccgatttaatcgccaccgggaaagctggcggtaaacaatggaaaaggcttgatgatcaactgaaagaaaataataagacgatcggcgagaataacaagaagattgccgaatgtgagaaacggctggataaaaccaccatgagtgccaaccagctggcaaggaaggcaaacgccttgcggaaagagcttcgcgatacggtgaaatctttgcagccggaaaaatatgccgccctggagaaggaactgaaagaagttgaaaaagcatacgggcaggccacgaaaaaggcggaaggtttcggcggctcccttctttccctgaataagataaaaacggttctggccggtgtgtttgtcactatcggcgcaatgataaccgggcagattatcggcgggctaagggatgcgatcagtactattatagagtttgagaagaaaaacagtactttggccgctatccttggaactacgaaaaagagtattaaagatttaacggatgaagcgcgccggctgggtgctactacttcttatacagccgcacaggtaacggaacttcagatagagcttgccaagctgggatttttcaaagaggatattaaagcgatgacgccttccgtactgaaattcgctaaggcggtggacacggatcttgcctcggctgctacgcttgccggtgcaacattgcgtattttcaaccttgatgcggaagatacggaacgggcactttctaccatggcaataggtacaacgtcttcggccttgaattttgaatatctgaatagtgcaatgtctaccgtcggcccggttgctaattctttcggattcacaatcgaggaaacgaccgcccttttgggagctttggcaaacagcggtttcgacgcttcatcggcagcaacggcaacacgtaatattttgcttaacctggctgacagtagcggcaaactcgcgcttgctctcggtggtccggttaacaacctggatgatctgataaagggacttaaaaaactaaacagtgaaggaatagacttgaacaaggcccttgaactgaccgataaacgttccgttgcagcgtttaacactttccttaatggtaccgataccgtgctggcactttgcgacgcggtgacaggtgcagaagatgcctttaatgctatgtccgaagaaatgggtgataacgttcaaggtgcattaaaccggctaagttcaactatcgaaggggtagttttacgtttctatgaatcaaagggtattctccgggatttaatagaccttgttacgcttatggtggaaggtgtgggtggtatgatcgacatgtttaataaatggggtgttgtcacttataccgttaccgcttatttggtttcttattatggaggactgaaaatcgctaccatgtggcacgcccgttttaaaacggcgacccttgcttcggtcgttgcagagaaagcgcacgccgtacagctttatatcagccgggcggctactctgacttatgcggcagcccaggcactattacacaagaatactaccagatgtaccgctgcacttcggttaatgaggatcgaacttttgaagaatccatatacggccctgctcgcgttactcatggcagccggtgttgctatctaccagcttgcaaagaagacggaacaggcttcggcggcgatgaaggcccaccaggaagtcgtaaagaaagtgaatgaagaatattccagccaggaagcaaaaataaaaactcttgtagctgctatcaatgatgagaacctttccaactacacccgtaaacaaaggctcgcagaattaaaagaactgataccggattataatgcggaattgaatgaagaaggtaggctcataaacaacaacaaggaggccatagatcaatatttagtttccttggaaaaacaaatcaagttgaaagcttaccaggaggaactggaagaattgtacaagaaaaaaaggaatcttgaaagccaggaatcagagcaaagcgacgcttactgggacacccgccagcaaaatacattgtcaggatataaccggaacagtcttaccgctaaaataagccgtttatttggtacggaaaaagaggctaaccagttgaaagccctacagacaacacagaaggatttggccggtatagaatcagcaatcgcccagatcaataatgatatcttaaaaacagaggcgacggccacttcattaaccggaaccaataaagaaaatataaatactgaaacatcccttataaagaaactggaggccgaaaagaaaaaggttcaggagcaatgggcggaagacagcgaagcgaatatcgccaagaaaaacaaggaaatagaacgtatcgacgccgaaataaaacgtttaaacgaactggggaaggtcaaaaagaaagcggaagccggggagtataaaaatacggaaacggatgccacattaaaacctctggagatcgagcacgaaaaacgtatgcttctaatcaaagagaaccgggaaaaggaaaataagacggaagcccagtatattctcgaagggacggcggaaaaccttcgctattactgggaacgtctcgacgccctccagaagctggaagcaaaaacaccggcccaaaagaagaaattactcgatgaaatccacaagctcgaaacggaagcgcaggcggccatttttacggaaaccggcaagcaggaggacgcccgtataaaactggcacaggagaaacgggatgaacggttaaagatcgaaaccgcttattacaacgttcagaaggacaccatggaaaaagcgatattaaaccggagtatcacgcaggaagccgccgatgcctatatgctggaagttgaacaggcacatacggcggaacttttggagataaaccgtacctatctggatgatataaacgccctggagatcaccagtaaacaaaaacgtatagatgccgttacggaagcggccgacgccgtgcgtgaaaccgagatgcagctactacgtgaccaggcggccattgctcaaaaagtacgtgaaataacttccgttccggtaggaataatcggtatgcaggaagcacaccggaagcaggttcaggatgtagaaacgacttataatgccataattgagatagcgagacaggcgggaatttctaccgttggtttggagaaacagaaacagcaggaaattagccagcttgaatttgaataccagaatagtttataccagattcaatcccagatcggcgtatcatgggcgcaggaataccagaatgaactggccctgttaaagaatctgcacgatcaggaattaatagacgaaaagacataccagcgtaaaaaactgcaaatgcagatgaataacgctaaaaaatactttgactattattccggcctttcctcttccatggtggaagctattcagcaggccgaaatcgaccaggtggaagcaaaatacgatgttctcatacaagaagccgaaaacaacggggaagatactgccgccctggaagaagagaaggaaaataagaaactggagattcaaaagaagtatgcggatgtaaattttgctattaag

SEQ ID NO: 3070 - DNA, 1378 bp, Unknown
  gut microbiota DNA sequence
cggaaaacgagactcgaactcgcgaccctaaccttggcaaggttatgctctaccaactgagctatttccgcattttttcgtttgcggttgcaaaggtagggattttccgtaaacctgcaaacattctgcacacttttttcacagaaatctctgcactttgcctccaccgccaaacaatctttttgattatcaactcattcggtcacgataatcttcataagaaaattgcttgtatatttcagccttcccttctttcgtccacaaagcaatggcaggatgatgaattccgttaaacatattcgtctttaccatggtgtaatgaatcatatcttcaaacacgatccgttctccgatttgcagttcatgatcgaaactccacagccccatatagtcaccgctcaaacaggagtttcctcctaaacgataaatatattttccttcatttcccatttccgcaccgcgaacggcaggctgataaggcatttccagacagtcgggcatgtggcaggtgaagctgacattcaatatggcagttttaataccacggctttctacaatatccacgacttcagaagtcagcacacccgtctgccaggtaaaggccgaaccgggttcaagaataatacgtaaatgaggataacgggctttcagtccctgcaataattttatcagatgttccgtatcataatctttacgtgtcatcagatgtccgccgcccagattcaaccatttcagttgcggaaaccaacaggaaaacttttcttcgagatgttccaacgttcgttccaactcaaaagaagaagactcgcaatggcaatggcaatgaaagccttcgataccttgtggcaacgtatccggcaataaatcggcagtaattccgaaacgcgtaccgggagcgcaaggattgtaaagttccgtttctacctccgaatattcagggttcacacggataccacaagagataccgcctccttttgctacggtcatcggatagaaacgttcgaactgtgccatagaattaaaagtaatatggctactgcaacgcatgatttccgggaaatcctgttctgtatatgcaggtgaataagtatgtgccttacttccgaactcttccagcgccagacgtgcctcatagaccgagcttgctgtagaatggtctatgtattcacggaatatagggaaagagcgccacatagcaaacgacttgaaagcaagaataatctccactcccgccctgtcggctacgctttttatcaaactcaagttctttcttaaaagttcttcttccatgatgtagcagggagaaggaaactgggtaaaatctatcataatctattgtattatcttaaaataacgccttatggacgtggctgcaaaa

SEQ ID NO: 3071 - DNA, 244 bp, Unknown
  gut microbiota DNA sequence
cgacttgcatgtgttaagcctgtagctagcgttcatcctgagccaggatcaaactcttcattgtaaaagtatcttttaatcggcatgtgccggttatagctctgttcaggatgccgtacaatttattgacttcattctaatacctatatctattacatatatatgaacataaataacagattgtattgacggttctatcttttcttgtactacttgtattgtttatcaatatttcaaagaactt

SEQ ID NO: 3072 - DNA, 6169 bp, Unknown
  gut microbiota DNA sequence
gttgatacagaattggtatcgggtaagattatctgttggtataatttctaccggatagcttttgttattcccgtccttgacggtcaatatcttttccacctcttccttttttacgatgtcgctgaaacatatttcccccttgatatttatttcatccggttgggcatctgtgataggtagtggttctatggaaagtgtgaaattgcgttcctgtacccggaaggagaagttgaactcctttaatttcttgtccacttcgacgaatttgccaagttggaacgtacactcataaagtgaccccggcttcagtgtaccttcttcgggtacaaattcaatggtattattactcacccaatatgccttccctttcagtgaaggtgaaaaactaaatggattttcctttaactcattatttaagtctaccattggttgctcgtgtgtcagttcaatacgtatggtagagttctgtgaaataactcctcccgtataggcatttacatacggagcatattcggcagaaggaatgatgtctttttgcgtgcgtgtgcatgatgaaaaactcacgatcatcaaaagcagaaagaatagtccggtagcactactgctacatttagttttcatttgtcccatagcgaagaggttttataattcaacaaacaaatatactgtttttatgatagattcttctcaattctacttatttttgtgaactctaataagatagtttatgggaaagaagaaagaatataaagaagccaatcggcgatttctgaaaaacctgtcttttcaggaaggtgtttttgcattgccgtgtggcatctattataaaatactggagaccggtgaaggtacggtttctccgggtgcgcggagcattgttaccgtgcattacaaaggaagtctgattgacggtcgggagtttgataattcttatgaacgcagttgtcccgatgctttacgtctcagtgacgtaatagaaggctggcaggtggcgcttcagaaaatgcacgttggggataaatggataatttatatcccttatacaatgggatacggcaataaatcagttgattctattcctgcttactcaacattggtgtttgaggtagaactgttgggagttgcttagaaacaagaaagcaacccttcagattgctttctctctctcttggtaaacagccacttggaataaagtggacaaacaggtaagataataatattagcttttcatttttatactaaattaaatattaaaacgcggagatacggatataaaagttccttaccggaacaaatccgtatctccgtgtacccatgtttaataataattatttatgaagtttgatgtttcggacatctccttctttaaaatcaaaatgcttcagtttcatacctttccggctacctaccgtaagcgacttcaacgagagggtgccattaatcacttctatggtaacatcatcttctgttacttgaaccgtaccccatgaatagccgttgctccagaaatagttgcctggacggtctgttatcttcatgcttttatcaacacccgaatattggaactcgctcaaagctatgatagcagaccagcttgccatggagcgagcgtaatggtgtccgcattccgattcactgaaaggattacgttttgcaccatcatgacggcgtcggatggcattgatacaagtaagagcatcttcttccatgccttcataaagcattccaacggcagcacaatattcaaatcctgtcatgacttcggaaaagtatgggaatggaacttccagacgtcctttcggccaagaagccataagtaaacctgcttcatcgcccattacgtaagaacgcatattgttaaaatgacggctgaagtcttccacgaagttatatttcatgatactcttcatagttgtttgtatattcttcttatcacccagataacctaatccgcacaagtgagccatatattgtccaacaagctggtcgacaagacaaccttgtcctaactggaatcccggaatcttaacatcagggtcgttcatgtcaagaaattcaaatgtcttcggatctgtaatcttatgttcatagtactctccgttgaacagattttcgtccatccattcgcttcccttctcaaacagtgtacggcatttcttcgcaaagcttttatctttcatagctattgacatcttttcggcagcctttaaagctcccatataccaaaagcccatttgaggattaggtccaaagtagtttacatccatggtattatgttgcgaaccttccattactccatcctgattaccatcccagcctttttctatccaagcgtatgaaaggactttcttcacctgttcccagttatttctcagaaaatcattatctccggagagttgccattcgcgatatattttcattatacatcccatttgcccgtctgcagccggattgttccctttgcttgcttcagaaagtgggagagatgccctgaaattcatcaaaccgttttcctttgtggcatagttgaactctacgtcacgcatggtttttgccagttccccgaaaagataaggagtggcagtttcgtagttccatacatgggtacaagaaccttcacacgaaccgaaacggtccatcacaccttcccatcccatcatgtgaccgcttggcaaacgaaatactgtttgagagcgcaatgtggctagattgaataaagccgcctctttcaccacctccggataagaagtgccgagcagtgcattaatgaacgacaatgtcttattttctaatccgggtatttgtgggatgatagtttccgctgctttccaagcatcaggatattgattgctataatagttgcctactacaacagaagaccaagctttcctgttcgggaaactccatgtgatataaaatgtaaatgtttcagtactttgtggagctattgtcttatttacagacaatgaggccataggatcttcatcttcctgcttacttcgttcggtcagcataccatccgcactaaaatcatcccaaaagttgagaatgctattgttccagttatcggcttttgacgaagtacggtaagtcacgccattaactgcctgagtggtaagcgcaacagttccccatgccgaatcatccttatctacaccatccgaataaaggtatattccttttatattgttgctttcaacatacttgttcttgttgttctttgctcctgtaggaatgtaatcacctttccagtctgtacggaatttacttccgtccttacctataaagttgcgtatcgaaccacagattgatacattcatcggttggtcggtagtgtttgtaacttcatacgagagtacggccacaggcaatccgctggcatcggcatcgccaggaataaacgggttaaaaccctttaccttaacttttacaggcagattgctgtccgataaagaaacttgtccgaaagggtatgccgcctcgaatgaagcttgttcaaaacgcggaagaccatgatgattgacaggacgtccttcataatgtaaatattcatgcgaatataatggtcctgtcagcaatgtggtagtcgctttctggttttgcggtttggcatagattgcaaagaaaggagcattgttccctgtggttactgtgctgtatttctttgccgggacattcattatttcccagtcgcgtagttctccacgccctccgagcgatactgtaccagttccgatacctcctaaaggtaacgcaatttggtaaagatgttccttgtcatatttctttaatacaggccattgttgcggcttccattcttgagcctggaccgtaataataccggaaagcaatgctccgattgcaattaaatagagtttattcatatcgtaaatatagttttatgtgagttcacgattagatcaaccgtatcaaaattccaatatccttttattagaatttaatggtaatattcttttatttcccaaatgggtttgtacggtaaagataactaatttagtgattataacaaattttgttacagttaccataggcttttacttctaccttcgccctaaactcctgtaaatgatcaataaggatggaatgttgttattgtcggattcaaatagattggcaatatttgcataaactcataattatatgaataaggaggggtggctaaaagtcggggtggtaggtgcgcctatctgtgcatatattatgcttgtgcatttacctaccacctccccctacgggtactcctccttcccgaaggaggagaatagagataacaccgacttgtaaattaccactaaatttgaagaagaaccttcttgctttgctttttcttttggtatagagaataaaaatccccataaccttatcagttacagggatttaatatgttgtaattgttataattacttgctcaaagcctgagctacgtcaacagcacaagccactgtacaacctaccatcgggttgttaccaattcccaggaatcccatcatttctacgtgagcaggaactgatgaagaaccagcgaactgagcgtctgagtgcatacgacccatagtgtccgtcataccgtatgaagcaggaccggcagccatgttgtccgggtgaagagtacgacctgtaccaccacctgaagctactgagaaatagggtttaccggcaagaacacgttctttcttgtaagtacctgcaaccggatgttggaaacgagtcgggttagtagagttacctgtgatagaaacgtctacgccttctttccacatgatagctacaccttcacgaacgtcgtcagcaccgtagcattttacttttgcacgaggaccgtcagagtaagcgatttcgcgaacaactttcagttcaccggtaaagtaatcgaattgagtctgaacgtaagtaaagccgttgatacgagagatgatctgagcagcgtcttttccaagaccgttcaggatgcaacgcaacggttctttacgtactttgtctgcttttgcagcgattttgatagcaccttcagcagcagcgaaagattcgtgacctgcaaggaaagcgaaacatttagtttcttcgcgcagcaacatagcagcgaggttaccgtggccgataccaaccttacggtcgtcagcaacagaacccggaatacagaatgcctgcaaaccgataccgatagcttctgcagcttcagcagcgtttgtgcagttcttcttaagagcgattgcagtacctaccacataagcccattttgcgttttcaaaacagataggctgagtttcttcacacgttttataaggatcaagtccggcagcttcgcagatagcgttagcttcttcgatgtctttgatgccgttagcgttcaaggcttcgatgatacctttgatacgacggtcttggctttcgaattttacttctctaatcatagtttctttcctccttatattattcgtgacgtggatcaatatgtttaactgctccctgttctgctgttacacgtccgtaagtacctgtaactttcttcaatgcttcgtttgcatctgttcccttcttgatttcatccatgaacttacccatgtgaacgaattcgtatccacagatttcgtcattcttatccaagaagatgtttttgatgtaaccttcagccatttcaaggtaacggggacccttagccaaagtaccataaagagtacctacctggctacgcagacctttacctaaatcttccagacctgcaccgatgatcaaaccaccttcagagaaagcagactgagtacgtccgtaaacgatttgcaggaagagttcgcgcatagcagtgttgattgcgtcgcaaacaaggtcagtgttcaatgcttcgaggatcgtttttcccggaagaatttcggcagccatagcagcagagtgagtcataccggaacatccgatagtctccaccaaagcttcctggataacgccttctttaacgttcagtgtcagtttgcaagcaccctgttgaggagcacaccaaccgataccgtgtgtcaaacctgaaatatcaacgatttcttttgattttacccatttgccttcttcgggtatgggagccggtccgtggttaggacccttctttacaacacacatgtgttccacttcgtgtgaataagtcataattagctcttttttt

SEQ ID NO: 3073 - DNA, 209117 bp, Unknown
  gut microbiota DNA sequence
gcaaatcgccttttattacttttttgtgaaaagagacaaatcggtttgcctttctccgtcgtttgtaaagtcgggattgcatttgtgaaagtttgaaggttgtagaactatctattcatatctttgttgttattgaaaaacaaaaaagtatggaactggatcaaatagatatacattatttaattgcggcaatttgtgtcatttcctctgcactcgttttttattcgatcggtgtctggggcgagcgactccaaaagaagctgaagttctggcatatagctttctttttgatcggattgatagctgatacggttggtaccagtttaatggaacatatcgccgaactgactcacctgcatgatgagattcatacggtgacggggactattgccattcttttaatgtttgtgcatgctttgtgggcgatatggacttatgtgaaaggttcggcaaaagctaaaaagcattttaaccgtttcagcattgtcgtttggtgtatttggcttataccttatttaataggtgtgtatatgggaatgcgcttacatccatagaattagtttccggacaaatagagaataatagtatatcccatagggaaagtactcaaaagtagtagctaaaataggaaaaggatgccggtattgttaggtcaccacggccgtggtaagatcttgtcatggacgtggagatatcctgccacagctgtggtaacttctcttcacggccgtggtgacctaacaatatcagcgctaaatatgaactatgaaagggggatagaagaagtatacttgcttctttagggtattaatcaagggggaagacggtgataggttgataggttggtgataggttgcaattaacctgtcaccgtatgcgaaaccacgatgaataaccactttgacgctctgcggtgataggtgaaagagaaaattgcattttttccttgtgtagaagataatgatttgcatccttatttgtagtatgagttattgagatgtagaataaaattcgtagctttgctgcataatttattaagaaagaattatgattgaagttatagaatctgctttacaaaaggctgcgggcgaaggaatggatgaatttatccaagtgtttaccgataaatataaggaagtgattggtggtgaattgactgctgatacgatgccattactgacaggtgagcagcattctttgttggcttaccagattttccgtgatgaaattatggttggcggattctgtcaattgatccagaatggatacggaggatatatttttgataatccgtttgcgaaggtgatgcgtttgtggggggcggatgaattctcgaaattgatctataaggccaaaaaaatatttgatgccaatcgtaaggacttggagaaggagcggactgatgatgaatttatggctatgtatgagcaatacgaggcttttgatgagctggaagaggtttatttggaaatggaagaacaggttacggctttgattgcaagctatgtagacgaacatttggaactttttgcgaaaataataaagtaagggatgcagtattttttaagtatctgcatttatcaattgtgaattagaatttatatctttgcaaaatctaaaaaatatgtttatgaaacaaatgaaatttttcttggtggctttgatggctgtagtaatgggaatgtcggttacttcttgtatgaatggggatgataatacacaggtaaatgaccttcctgttctaggtaaagtaaaagatagctttttggggttaactttcacttcattggatggatttacttttaaatcaaagaatacggttgaaggtacaactaactttatgacaggtgattttattgttgcaatgtgtagctatgatagagaggtggatatagattatacaacaaacactatcaatgcaacaatcggatctactgaaaaaatctcgggtaatgctgtacatagtacgacaaaagcagaagatgaaggagagcatccttcttatgtttcagatagaggtgtcataagtattaccgatttgaagccggctatgattgataactataacttgcttgttcctattcaatattttgcttttgagaaaatagccagtcatactttttttatggtatattatagtgatgaaaacgagcttaaaggtaaaacagatttaaaactgtttttacgtcatacttctacagaagaaaaggctaaagaaacttatagagctttttcgtatagagtctttgatataagaagtgctatagaggcttataagaatgcaaatgaaggaagatatccaagtaatattacgattgtatcagaagcgaattcaagcaataatgatgtccccaagacaacaactacaactcctgtgacttatacttttagagaataacattgaactacaaggaactatttaacatagcaatgaaattgatttcctctccggccaaggcctgggaggaaatttctatggaagaggataggcgaaaagtttttatggcttttgtctatcctatgattggtttatgcggcttgtccgtctttatcgggtcactattgaccaatggttggggcggtccgcaaagttttcagatagctatgaccaattgttgtgccgtagctgtggccctgttcggaggatactttctggcagcttatgccataaatgaaataggaatcaagatgtttggcatgcatgctaatatgccgttagtgcaacaatttgcaggatatgcacttgttgtaccgtttctgcttcagattgtcaccggactattacctgattttagaattattgcttggctgttgcagttctacattgtctatgtagtatgggaaggtgctcctataatgatgaaggtagaagaaaaacaacggttgaaatacacccttttatcgtccgttttgttaatactatgtccgacggtgattcaatttgtgtttaataagttgacggccatacttaattaataagtgaaaatgaaacaacctcctgtaaatattaagaataaacgtgctacgttcgactatgaactgatagatacctatacggcaggtatcgtattgaccggtacggaaatcaaatccattcgtttgggaaaagcgagtctggtagatacgttttgctattttgtgaaaggcgaattatgggtaaagaatatgcatatcgccgagtacttttacggatcgtacaataatcatacggcacgcagggacaggaagctgttgcttagtaggaaagaactggagaaacttcaacgggaaatgaagaatcccgggtttacaattgtgcccgtgcgtctttttatcaacgaaaaaggtttggcgaaactggtcgttgctttggcgaaaggtaagaaggagtatgataagcgggaatccataaaagaaaaagacgaccgtagagatatggctcgtatgtttaaaagatgatgatagggtaatgaaaaagacaatttctcagattgtatccgaccgcattcttattttggacggagcaatgggtacaatgatccaacaatataatctcacagaagaagattttcgtggcgagcgttttgcgcatattcccggacagttgaaaggaaataatgatttattgtgtctgacacgtcccgatgtaattcaagatattcatcgtaagtatctggaagcaggtgcggatattattgaaaccaatacattcagttcgactacggtttctatggcagattatcacgtggaagaatatgtgcgtgaaataaatcttgcagctgtaaaactggcgcgtgaactggctgatgaatatactgcaaagaatcctgataaaccgcgttttgtagccggttccgttggacctaccaataagacctgctctatgagtccggatgtgaacaacccggcttatcgtgccttgacttatgatgaactggcggcagcttaccaacagcaaatggaagctatgcttgaaggtggagtggatgccattctgattgagacgatatttgatacgttgaatgccaagaccgctatttttgctgcagaacaagctatgaaagtaacaggtgttgaggtgccggtcatgttatctgttaccgtgtctgatgtaggcggaagaacattgtccggtcagacgctggatgcatttcttgcttctgtgcaacacgccaatatcttttctgtcggtttgaactgctcgttcggggcccgacagttaaagcctttccttgaacagttggctgtccgcgcaccttattatataagtgcttatccgaatgcgggtttgccgaacagtctcggcaagtatgatcaaactcctgcggatatggcccatgaggtgaaagaatatatccaggaaggattaatcaatattatcggtggttgttgtggaacaacggatgcgtatattgccgaatatccggctttggtagaaggtgcccgaccgcatataccggctcctaaacctgattgtatgtggctttccggccttgagctgttggaagtgaaaccggaaataaactttgtaaatgtcggagaacgctgtaatgtggccggttcgcgtaaattccttcgtctgataaatgaaaagaaatatgatgaagcgttgtctattgcccgtcaacaggtagaagacggagctttggtgattgacgtcaatatggatgatggattgctggacgctaaggcagagatgacaacgttcctcaatcttatcatgtccgagccggagattgcacgtgtacctgtgatgatcgattcctctaaatgggaagttatcgaagccggattaaaatgccttcaggggaaatcgatcgttaactctatttctctgaaagaaggcgaagacaaattccttgaacacgcccggattatcaagcaatatggagctgcggccgtagtaatggcttttgatgaaaaaggacaggctgacactgctgcgcgtaaaatagaagtttgcgagcgtgcttatcgtcttttggttgatgaaataggttttaaccctcacgatattattttcgatccgaatgtgcttgccgtagctacgggtatcgaagagcataacaactatgcggtggacttcatcgaagctaccggttggattaagaaaaaccttcccggagcgcatgtcagcgggggagtaagtaacctttctttctctttccgtggtaacaattatatccgtgaagccatgcacgctgtgttcctttaccatgccatacagcaaggaatggatatggggattgtgaatccgggaacttctgtactttatagtgatataccggtagatattcttgaaaagatagaggatgttgtcttgaatcgtcgccccgacgctgccgaacgcctgattgaactggcggaagctttaaaggcaacttctggcgaagctgccggacaacaggctgtgaagcatgatgcatggagggatgaatccgttcaggaacgtctgaaatatgctttgatgaaaggtatcggagattatctcgaacaagacttggcagaagcattgccactctatgataaagcagtcaatgtaattgaaggtccgttgatggacggaatgaattatgtaggcgagcttttcggtgcaggaaagatgttcctgcctcaagtggtgaagactgcccgtacaatgaagaaggctgttgctattctgcaaccgattatcgagtcggaaaaagtagaaggaacgacttctgccggaaaggtattgcttgccacagtgaaaggtgatgtacacgatatcggtaagaatattgttgccgtggtaatggcttgtaatggctatgagattgtcgacttgggagtaatggttcccgcagagactatcgttcagcgcgctattgaggaaaaagtagacatgataggtcttagtggtctgattactccgtctctggaggaaatggcccatgtagctatcgaactggagaaagccggactggatatacctcttctgattggtggagctactacgtctaagatgcacacggcgctgaaaatagctccggtctatcacgctccggtggtgcaccttaaagatgcttcccagaatgcaagtgtcgcttcccgtttattgaatccgcaattaaaggctgaattggtaaatgaactggaggcggaatatgaggcacttcgtgaaaagagcggattactgcgccgtgaaaccgtttcactggaagaagcacagaaaaataagttaaacctattttaaaacagtgtcacaatgaaaaagattttctctttcttatgcctcttcatggcaatagttgcaatgagctcatgttcttctgcaaaagaagaaaaaggaacgtccggaaccggaaatgctgcattggataatatctttgagcgtaaaagcgtacgcacttatctgaataagggagtggagaaagagaagattgatttgttgcttcgtgccggaatggctgccccttcgggtaaagacgtccgtccgtgggaatttgtcgttgtgtccgaccgtgccaaactggattcaatggctgccgcacttccgtatgccaagatgttgacgcaggctcgtaatgcaattattgtttgcggtgattccgtgaaatcttcctattggtatctggactgctctgctgctgcccaaaacatccttttggctgccgaaagtctgggacttggtgctgtgtggacagccgcttatccttatgaagaccgtatgcaggtggtgcgtaaatataccggtctgcctgagaatatccttccgctttgtgtcattccgttcggttatcccgctaccaaagagaatccgaaacagaaatttgacgagaaaaagatacattataatcagtattagtaaacaaaagttttgtcttttcaataatttccttacatttgcgtctgaattaattaaaatctgatacgcaaatgtttggaatagacgacccttttataattctgccctacctgctttcggtagtatgtgtgatttttgctgcctggttcgggctgaaatactggaataaggacgacgaaaaagacgaaacacgatgaatacatttacactcagtttgattgtgataggctatctgctatcacttgcttatcttggttttttagggtataaaaagacaacgagtaccagtgactatctggtaggcggacatcagatgaatcctatcgttatggcactttcttatggtgccacgtttatttccgcatctgctattgtgggcttcgggggagtggctgccgctttcggtatgggtatccagtggctctgtttcctcaatatgtttatcggggttgttattgcttttatcttttttggtttgcgcacccggcgtatgggggctaaactgaatgtcagtactttcccgcaattgttaggacgtcattttcgctcacgtaatatccaagtctttattgctgctgtgatttttatagggatgccgctttatgccgcagttgtgatgaagggcggagccgtatttatcgaacagatctttcagattgacttcaatatctctttattgatcttcacgctggtgattgccgcttatgtgattgccggaggaatgaagggagtgatgtatacggacgctttgcaggcagtcattatgtttgcttgtatgttgttcctgcttttctctttgtatcaggtgcttgatatgaactttacggaggctaataaggaactgactgctattgctcctctggttccggaaaagtttaaggcattgggacatcaggggtggactgcgatgcctgtcacgggttctccacaatggtattcgttggttacttctcttattctgggtgttggaatcggatgtctggcgcaaccgcagctagtagtccgtttcatgacggtggaaagtagcaagcagttgaaccgtggtgtgtttatcggttgtttctttttgattataaccgtaggtgctatttatcatgccggagcattgagtaatcttttctttctgaaaacagaaggggcgattgctacggaagtcgtacaggatattgataagattattccatattttattaataaggcaatgcccgattggtttgccgcactatttatgctgtgcatcctttcggcaagtatgtcgacgttgagttcacagtttcatacaatgggtgcgtcggtcggctcggatatttatggtacgtataagcctcgctcccgtggcaaactcacgaatgtgattcgtttgggagtgttattctctatcttggtcagctatattatttgctatatgttgccccatgatattattgcccgtggaacttctatttttatgggaatctgtgcggcagctttcctccctgcctatttctgtgcgctttattggaagcgggcgacgaaacaaggggtaatagcgagtctttgggtaggaactcttggaagtctttttgctctggtatttttacatcagaaagaatcggctgcattgggtatctgcaaggcgttgttcggacgggatgtactgatagaaacatatccgttcccggtgattgacccgatattgtttgcattacctttatcagtcctggctattgtcggaatcagtctgttgacttacaaaaagtattaggctttaattttcttcttataagattcgtaccgtgacacaatgtcacgaacgaagttataagtttctataccacggaaatacccgtttttgcagacaggatcagtgaagtattcttcattgcttttaagcaggatgaaattttctacattatctttccacaccagtttgttctttccgtatttctctgccaatgccatggcatcatagatatgtcctaaaccggcattgtaagaagcgaggataaaattgaggcgttcttctttatcgggaatcatactgaaactgcggtcggtagcggcaatatacttgatagctgcctttacgctttcttccggattctgttcctttcccggaggtactcccatagcccgggcggtggcaggcattagttgcattaagcctttggctcctgcccatgaaacagctgttgtgtcaaaattggattccgtataagctaatgatgcaagcatacgccaatcccagccgatttctttggagtattttctgaacaaatcgtcataatgggatatttttccttcttttaatgaaaggataggagagtggggcatcattttactgttttcaaaataacgtttcatactcgctgtataagccggagaagtcatgttctcctgatgccattttgtagctgcggctgccagttcgggactgtcttttcgtacagcccatgaagaacgttggtcgaaactgacggacaaatcgatattcagattaggatagtaggtcttgttcagtttcgctaagtcattgtcggctaccgtatagggaattttaccttgtgctacttgcgtgatcaggtcttccacagtaatactgtcactggtaactttgtggatatgaatacctcctcccagttcattattcagattgacaagccggtcgtaatatttccccggcttaacatatatgtcttttcctaccagctcggttacatctttcagagacttgctttttccctgttgcacaatcacttgatgagtaatgatatcttccccgcaatagaggatactgtctttccattcttttgtgataggcaggttgtaggcaatcatatctccttcgccagccaataacttgcggattaattcatccacactgttggcaacttcaatcctgagcttcaatcccatacttttggcgaattgctcactaagttcgtattgaaaacccatttcctgtccacgatagttgaaatatgaagttgaactgtaaagcgtcaatacaaccaattctccgctatcttttatctgcgaaagatcgcgtacattttcattcaccttgttatgttgtttatttcggcaacctaacatgcagcagaacaacacaaggagtagagggataatcaggtttttggcattcatatttgacgttttacttctcattttcaacttaccattctcaaccccttaagtgcttcttgatgtacattgtcagtatatcaatggctactttattgcttccgccttcgggtacgataagatcggcatagcgcttgcaaggttcgataaattgcaggtgcatgggcttgagaacgcgtgtgtaacgttccattacagcttctgccgtacgtccccgttcgataacgtctctttgaataacacgtatcaggcgttcatccggatcggcatctacaaatattttgagatccattatgttgcgtagtttcttatcgcataaagcaagaatcccttcaatgataactacttcgcgaggttcaatatgaattgtttcgggctggcgggtacaagtcagataggaataggttggttgttcgatgctttttccttctttcagcatcatgacatgtttggagagcaaactccactcaaaggcatccggatgatcgaagttaatgttctggcgttcttccaccgggacgtgactactgtctttgtagtatgaatcctgaggtaacaatactacctcccctgcaggaaggctttctacaatttttcgtacgacggtggtttttccggagcctgttccgcctgctattcctataattaacatctctttaagtgtatatttaaaccaaatagagtaaatttgcattgtttatgcagtgcattgaccaggcaaatatagaaacaattcattaaaataacaacgtaatggtaaaacacattgtattatttaagttaaaagacgaagtttcagcagaggagaaacttgtagtcatgaataaatttaaggaggcaatagaagcgcttccggctaaaattccggtgatccgtaaggttgaagtcggattgaatatgaatcccggagaaacgtggaacatagcgctgtatagtgaatttgatacgctggaagatgtgaaatactatgcgacgcatcccgaccatgtggcagccggaaggattttggctgagacaaaggaaagccgtgcgtgtgtagattatgaattataatcccctaattattgaaaatgaaaaagttaatttcttcactgcttttaagctttgttgtatgtgttttgcaagcgcagatcaaagatccggtaaagttcaagactgagttcaatactctttctgacacggaagcggagattgtatttaccgctgccattgataaagggtggcatgtgtattctaccgaacttggagacggcggacctatttctgcaacgtttaatgttgataaaacgtctggcatagagctactgggaaagctgaaaccggttggcaaagaggtcgccactttcgacaagttgtttgaaatgaaggtgcgttattttgagaatacggctaaattcattcagaaggtgaagctcacaggtggagcttatgaaatagaaggttatctggagtatggagcttgtgacgatgaaagttgtcttcctcctactgaagtgccgtttaagttttccggagtagcgaagacagctaatgctgctgcagctaaagcggaacaaccggaaaaaaaggaagttgagaaaaaagaagaggcggctcctgttgtttctaaggatactgtagctatgatggaactggttcctgccactacaacagatgcatctacggggattcaacctgccgttgcatccggtgaactctggaaaccggtcattagtgaactgcaagcgttaggtgaagaacatacgcagggagatatgtcctggatttatatttttgtgacaggtttcttaggcggactattagctttgtttactccgtgtgtatggccgattattcctatgacggtcagttttttcctgaaacgtagtaaggacaagaagaaagggattcgtgatgcgtggacttatggtgcgtctattgttgtgatttatgtggcattaggcttggctattacattgatcttcggtgccagtgcgttgaatgccttatctactaatgcaattttcaatattctcttcttcctgatgttggtagtttttgccgcttcgttcttcggagcatttgagattacattgccttcgaagtggagtaatgcggtagatagtaaagcggaatcgactacgggattactgagtattttcctaatggcatttacactttcgttggtgtctttctcttgtacaggtccgattatcggatttttgttggtacaggtttccacaacgggaagtatagtagctccggcaattggaatgctgggattcgccattgctttggcgttgccgtttactcttttcgctttatttccatcgtggctgaaatctatgccgaaatcgggaggttggatgaatgtgatcaaggtaacactgggtttccttgaacttgcatttgcacttaaattcttatcggttgccgatttggcttatggctggagactgcttgatcgtgaaactttccttgctttatggattgttatttttgctttacttggattttatctgttgggtaagatcaagttcccgcatgatgatgatgataataaggtaggtgttacccgcttcttcatggcacttgtttctttggcatttgcggtatatatggttcctggtctatggggagcaccgttgaaagctgtcagtgcgtttgctccgcctatgcagacgcaggatttcaatttgtataagaatgaagtacatgccaaatttgacgattatgatttaggaatggagtatgcacgtttgaatggtaagcctgtaatgctcgactttaccggatacggttgtgtcaattgtcgtaaaatggaggctgctgtttggacggacccgaaggtgagcgacttaattaataacgattatgtattgataactctctatgtagataataaaactccgctgaccgaacctgtgaagattgtcgagaacggaacagaacgtaccttgcgtactgtcggtgacaaatggagttatctgcaacgtgtgaagttcggtgccaatgcacagcctttctacgtattgctggataatcagggaaaaccgttgaacaagtcgtatgcttatgatgaagatattcccaagtatatcgagtttctgcaaactggattggaaaattacaagaaggagagataatctccttcttaaaggttcttcttcaaatttgctggtaaggtgaattagtaaaataatgatttgctagcttatagtcgatagtatcctccattctcctccttcgggaaggaggagtccccgtagggggaggtggtaggtgaatgtgtaagtgaactgcccccaatagttagacacaaaactattgggggcagttcattctttttgaggtagcctcactattgtcaagtatgttttctaccagtttcttttcactgtacgatagccgtaaccgataatcacaaggaaacagataaaaggtagaatgaatgaaacgttgactgccggcaaccaaccgatttctttcatatcaataatgcttgcttgcaatggaggaagaatagaacctccgagaatagccataataagtccggctgctccgaattttgcgtcatctccaagaccttttaaggcaataccgtaaatagtggggaacattagagacatgcaggcggatacggctaccaggcaatagagtccataaatattttgaaggaagatagtacctaaggtgaaaattcctccgaaaatagccagaatcattaataattttcctgcattcagataacgcagaatgaaagtacaaatgaaacggctgatacagaaaataatcattgctatgatattgtattgctgcgaaagcacttccgcactcttttcgtccatgccgaattccggtgacataaacaggcgggtaccatattggattataaaagtccagcacatgatttgtgcacctacataaaaaaactgagcaatcacaccttcgcgataacgtgtttgggtgaaaatacgttttaatgtcgggaagaagtctattttatggttctgatctccgttctttggcatttttacgaatcgtatcaagagaagcatagctacgataatcagaccgatgataagataaggggcgattagcactgcaagatcgctctctttgattgcctgaaattcactctcattgagtaaagcacgttcttcagtacccattggatgtaatttggcttgaatgaattgcatggctacatacattccgagcaatgaacccattgggttgaaagattgggcaagattcaaacgtcttgtggcagtatcttctgttcccatagaaagaatgtatggattacagcttgtctccagaaatgagagtccgcaagtcaagataaagtaagctatcagaaacgggtaatattctcctgtcattttagcagggaagaataggaatgctccaaaagcatacagaccaagacctagcagaacacctgctttataagaatatttgcggatgaacatggcagccggaaaagccatggcaaagtagcctccataaaaagcgacttgtactaacgctccgtcggtagcactcatccggaagattttggaaaatgcctttaccattgggttggtgatatcgtttgcaaatccccataacgcaaaacaagaagtgatgagaataaaagggataagataattgatgccatcttttgacaggatggactgtttgatgtgtttcatggttcttttgggatatttttaggtattatataaatggaacattctctccattggtttccatttttccgcggaactcattccgggagcggcttgttggaagatagccatgtattcctcccattcctgttggcggggaagagtattcaggcgtgccattgctgtgtcccagtcgaagtcaacgggagtttcgacaatcataaacaagcgtgtgccaagaatatagatttccatttcgaggatgcctacttcccggatacctgcaaggatttcaggccatgcctccgcttgactatgtcttttccgatattcggcaatcaattccggagaatcgcgtaagtcaagagtctgacaatatcttttgactgggacgctgtaagattggacctgataaccggttttaggtgtttccatatactttttattttttaggataatatacttgaggtgtgacacttcggcttacaatctctcttaattcccggaggtcggaaatttctcccttagccattgcttgtgtcagaatattacctatggcagtagcctcgacaggaccggcgtaaacagggatattgagtgcatcggctgtaagctggttgagtaatttattctgcgaacctcctccaatgatgtttaattggcggatcggggaggggagacaatggttaagcttttctactgcctgttggtatttgaatgctaatgattggagtacacatttaacggtttccgctttgctttgaggtatgtgcagagagtgatcccggcaataattcataagagcagtctccatattttccggattcatgaattccggagcgtcaacagggatgattgtatcagtttccacttcggcagcttgtggtatgattgtatcataatgttgttcttctccacgtgctttccattcactcatcaagcgttgtagaatccatagtcctgtgatattttgcaggaagcggatgcggcctccaacacctccttcattggtgaattcggctttccgtgcttcttctgtcaatatcggttcattgacttcaacgcccaaaagcgaccacgtaccggaacttagaaaagcaataggagtttttgtcgccggaacggctgcaacggcactggctgtgtcatgagaacctacggctattacatctactgcacccagtccggtttcccgtgcaatatcctcttttaaagtacctctgatagttcccggttggataatttcaccaaacagatgctcgggaagttctaatgcacgaattgtttcttgtgaccagtttcgtcgttttgcgtcaagtaattccgaagtggaagcgatgcaatattcattattggctattccggtcaggaagtaactgaaaaggtcgggcatgaacagaagttggtgggcaatctctaattggggatcccggttctgtttcatactataaagttggaatagcgtgttgatagccatgacctgtattccggtagtagtatagtgttgctgttcatccagaaccttgaatacctttgccggcattccgtctgttcttgcatcccggtaacagatagggttacttagcaaatttccatttttatcaatcaatccgaaatctacgccccacgtgtcgataccaattcccttgacggcatatcctttttgggcagccagcttcagtccggttttcatgtcttcgaatagggcaggaaaatcccagtagacatgatttcctaattttacctgacggttggagaagcggtgaacttcttccagttccagctttccatggagaagggagccggcgataattcgtccgctacctcctccaaagtctgctgctaagtatgtgtttttaatgttgtctttcatggtatggtatgtacggatactattttgttttctttcctaatacatagatttccaaatcttctatttctgccggtgtcaatactgaataatcgcctccggactgaacaataatacggcaagccatttcgaagaaggtagctcgttcgtacacttgattaaagtcttttccgcagacaacttgtccgtggttggtcaataagacggagttgtgttccaacatggcttcaactactgctttggccagttcgggtgagccgggacgataatatggaatcacaggtatttctgaacctacatggcagggaatttctgctgttacattaaaattagtcggcttgtttttcatgcaggagatagccgtggcatactccgactggaagtgaagtaccacatttacatccgggcgttcgcggagaatacccaaatggaaagtactttccatagaaggttttacaccattagtcggtgttccgcttgctatattgcagatagagactttttccttgccaagggtaggaacccaagaacctgtaccggaaattaatgcttcttcaccaatccgccaggaaaggtttccgctactgcaaagcataagttttgcatcaccgtagcgatgtgcttgttcaatgaactgttcgatatgttcgttagttatcatgattgcaaagataaattatttataataatagtaactcaaaataggttagaaaaatgggtatttagggacatactcccccggtaaggtttccttgcaggggattgtcattgcaggcacggattacacggcttttagaaatatgaaagcaacagcgtaatccgtgcctgaaaattatttgtagataggaccgtaggttgcacaagctctatagtctgctccttctttatccataccgaaggcattccatgcagccgggcggaacatttcgtcttcttctacattgtgcatgcataccggaattcgaagcatcgaagcaagagtaatcaggtcttgaccaatgtgaccgtagctgattgctccatggttggctccccagttattcattacagaatacacatccttgaaagccggtttgtcgcataaacggggaacaaaccaagtagtaggccatgtaggatctgtacgcatattcagtttttggtggatttccgggtcgatctcgacagtccaaccttctgcaatttgaagaacgggaccgaggcctttaattaggttcagacgcatcatagttacaggcataccaccttttgacaagaaattagatgaaaaaccgccgccacggaagtaatcacggtctgccggataccaggtcgttgctttaaggcagttttctacatctgtgtcagtcaggttccaaggttctttcattaccggatttccttctgcatccaatgattgtcccgaaccgtctagggttgttgctccggagttgataaggtggataataccgttggcggccagccctgtcagttctttgccggttacacgtttcacagcttcggggctccagtaagtacgtacatcagagaatatttgagcacggttggtcagtaagtgtccgaacagcattgccacaccgttgcaggcatcgttctcggtagctaccacgaatgcttcgcggataccgttccagtcgaaggaagtattcagcagagcttcgggatagtcgccattaggatagaagtcagtccattggcgttgtccttggaaaccggctgcaatagcattgtgccctaatgcttcttctttgaagcccatttctttcagtttaggattaccggtcatcaggtcgcgcatgataatcatcatcttcacgataaattcccagtctttatctttctcttcgcggtttttacgtttttcgggacgatttttgaagtcatcgccttcgtttactttgcaatgcttttctgtccatgccattgctttttcatattcttcgtggtcatagataccttcttccatgcggcggatgatttctgtcaggtcgacagactcattacgcattcccaggtattcctggaagaaatcaggattaacgatagaaccggcaattcccatagatacgctacccattgacaggtaagatttgcctctcattgtagctactgcctgtgcggcgcgtgcaaaacgaagaattttttccgctacatcttcgggaatgctgttatcgtccaaatcctgtacgtcatgtccataaatgccgaatgcaggaagtcctttttgtgcgtgtcctgccaatactgctgcaagatatactgctcccggacgctctgttccattgaatccccatacagctttcgggtaatgagggttcatatccatagtttccgcaccgtagcaccagcaagaagttacggtaatagtagaacctacaccttctctttcgaacttttcagcacaggctgcgctttcagcaacacggccgatagtgctatcggcaatcacgcattccacagggcttccgtcaccgtttttcagattactgctaattaattcggctactgctttagccaagttcattgtcttttcttcaaggctttcacgaacgccaccctggcgaccgtcgatagtgggacgaatcccgattttcggatactttttcatggtttcttaattttttttatttagtaaataacatctgtgctgagctgtgctgattgtgcggcaaaaaaaatcagagtgactttcgaagtcgcacttcagtaggcatgtacttttgtatcgggacattgttgagtacgaagtttgccgcttcatttcccaccatttcccagtcaatacttaatgaagtaattccttcgtcgatgacctcgtatgaaggaatatcattatatgctaacagaccgaaatcttttccgcatttcagtcctgccaatcttccttgttttactacctttactacatcttgctgtttgatagcaatgtatacagtccctttgcggaccgtcaggttctcgatatcttcctgtatttcatgcaagaagccttctttttcacagaaacgtgtgaaatactccttactactctgagggtgtttcaaacctttagaaaacaggaaaacgatttgaagatatttctgcattctttcttttagtgtaaataatgctagatagaatgaatcatcgaaatcctgacagatatacgagtatttatctttctcaaattttccgaaatcaaggagtaataacctggaaggattgattttattcagagctgtgctgaacttttcgttatcgaagttcatcactatatattttttatactttcctatggattcacggatgatagtattgaaaagccgttcattgtattggtggaataacaagtctactttatagttgataggcaaatgttttatgaaactattgtataaggcctctttgaaaggagtatattcgtcaagtaataataggatattggttacctgactggtcacatagtatccttttcccggtgtagagtctatcagaccccgttcgcgtaaatccagaaaggctttaaaaacagtatcccgtgatactccatattgtgcacttaactgattgatagaaggcaaggaatctccctcacgaaattctttcatggagattgcctggctgagcgtgtctgccaattgtgtgactttgctcgagtgttggccgaatgttgctttcttatcagttcgtctcatccttatttattattgataactgtgctgaactatgctgatgcaaagaaaggaattttattctaaataggagaaataatttactatgttttatagcataaagaggataatttcacatgacgtaacatagaatctgctatttgtagattatcaggtctctgtataaaacctcagtttctctcgtgttgaaacaaaaaaatcccctccggcgaaccggagaggatttatagcttttccttgtttcttgttcggaatctgccgaatttattcagcagcagcttctgttgcaggagcttcttctgccggagcagcagtttcttctgcaggtgcttcagcggcagctttttcagcagcttcagcagctttcttttcagcgagtgcttttgctttcacttcgttgattttcttttctgcttccaggcgtgctttggcttcagctttcttagcttcgtcttgtttagctttcaaagtagccagacctgactgtttgttgcttttccaagcttcgaatttagcttctgcttctgcttctccaaatgcaccttttgctacaccgccaagaagatgtttcttcatgtatacaccttcgcgagaaaggatgttacgtacagtgtcacttggttgtgcacctttcagtacccaagccaatgcagcgtcgaaattcaaatctactgtagcaggattggtgttagggttgtaagtaccaatcttctcaataaatttaccatcacgtggtgctctgctgtctgcaattacaattgaatagaacgcgtaacttttacgtccgtgtctctgcaatctgattctagttgccatttttaataattgtttttaattaatgatttgaattatgctactaactcgtaatagcgggcgcaaagatacggcttttcttttgattgacaaatatttctgttctttttctttatgaataccgtttcggataacggaataagatagcgagcagggcgcaagctcccattgtaaacggataataaagattgccgatgatactgataggagagatattggctaatccggcagcaatcagcatttgtgccccgtatgggataattccctgtatcagacaggagaaagtgtcgaggatacttgcagtctttcgccggtcaaggtggaatttctgcgcaatgtctttggctatcggtcctgttgtaatgatggctattgtgttgttggcggtacataagttggcgatacttactaaagcggcaatacttagttccgctccccgctttccgttgacgtggagggttagtttccggataataaagtcaataccaccattgtagcggattgtttcaagcattcctccggccagtaaagtaatgattatcagttcgcccatgcccgtaatgcctgttcccatagctccgaaccagtcgaacacatcaatacttccggtagtaataccgataataccacttgtcaggatacctatgattaatacgagcataacgttcattccggcaacggctgttcccaatactactatataaggtataacttttatccattcgatagtctgtacttgggtgggagcagtgatggacaatccctggaaaatataaatacccagcacgataatagctgccgggacgacaatcagggaatttaccctgaacttatcacgcatcacacattcctgagtttttgttgaggcgattgtagtgtcggagataaacgataaattatctccgaaaaaagaccctccgacaacaactgccaccatgaatgggagagcaatctctgtcttttcggctagtcctacggcaacaggagtgagggcaacgattgttcctacactggttcctatggatagggagatgaagcaggcggctataaatattcctgctaacagcagattgtcgggaagaatatgcagagtcaggttgacggtggcatcaatagcacccatttgtttggcactttgcgcaaaggcaccggcgagaatgaatatccatatcatcaggaggatattcttattggcagctcctacggagaattggtaaatccgctggtccagtttcaagccgcgcgtgatagcaatcgcgtagcaggaagaaacaagaaaagcgacagtgataggtaccttgtagaagtcgttgacgagaatggaagttaccagatagaggcagaggaacacgaacaacggacttaatgcccaccagctaccggaacggtcgttatgtattttttcttcggtcataaatgagattagtaatatttgtttgagctgcaaagatagtaaggaaacacataagtagtataaaaggctcagattttcatcttttctttttccgtttgagcctttcctttttcggtttcggaaatttaaagttgggcgcttttctttgtttcctctatttcttcgtaccgttgataatataactaatgtagaatagaatgacaacgactaattattcaatgtgtatgctttttatctgcctgtttgcgtcgtgcggaacaggagaaaagaggactgatgaatcaatacggataaaagtggcagaagtagaaatgtcggttccttcctcggaacgtgagttttcgtttatttcgaaaccattcaaggagacggaactatcttttcgggtaggcggtcctattgaccgttttgaggtatatgccggtaactattatcagcgtggggatatcattgctgaaatagactctcgtgatttccgtatccgtaaagaacgtgcagaggctatctataatcaggcaaaagcggaatttgaacggataagagtgttgtatgagaaaaataatttatctgccagcgcttatgaaaaagcacgtgcggattatacttctgctaagactgcttttgagacagcgacaaatgagttacatgatacgcagttgattgcaccttttgacggatatgtcggggaagtgtatatcgagaaatatcaggatgtgaaagcgactcaacctgtcatctcctttattgatattactcaattaaagatagaagcttatgtcacacaggatattgcacttcaggccggagaaatcaaagaagtaagtgtgcgctttgatataggttctgatgttgtatatccggcgaaagtggtagaaatttccaaaagtactacccggaataacctgtctttcctgatgacggcattattacccaataaacagggtgaatggccggcgggcgtttccggaaaggttttgcttgatcttccttctccttcaacgacatccatgataaccataccgcaaacagctctcaatcatcgtcctactgaaggagattatgtctggacggtagataatgctgccggaaaagtctcgaaaagaaagattgttttaggtgaattacttccgaatgggaaagtggaagtgaaaggtggattacaggctggagaaacggtagctgtcagtaaattgcgtttcctttcagaaggaacatctgtagaaatcatggctcagaaacaaggaatgccggtcactgctcaaaagtaaatttgaaagtatgaagtttgtgaaatatttcttgcagaaaaggtcggtgactattctgctcttactattagtcttaggaggaggactactttcctatgtcaaaatgggaaagttggaagatgctccgttcactataaaacaggcattggtattaactccatatccgggtgcttctccttccgaggtacaatcacaagtgactgatgtgctggaagaatccatacagtctttaggtgaattgtattatcttaaaacagaaaaccgggcaggactttccaagataacggtttatgtgaagaaggaaattcgtgcggatgaaatgcagcaactgtgggataaactccgtcggaaggttaatgatgtacaatctaagctaccggctgacgcaggtccgtccgtagtaaacgatgactttggcgatgtgttgggtgtcttttatgggctgactggtgaaggatattcgtatcgggaactggaagaacaggcaaaactcattaaaaacgaactgttgaaagtaaaggacgtagccaaggtcgaaatttatggtgtacaacctccgacgattgatgttattctcaccccttccgtcatggcgcgaagcggtattactccttcggatatttcccgtgctttcgaggcccaaaacagagtagtagatgcaggaggtattgatgcgggtgtaaacagaatacggattgaatctaccggaaatttttattctttggatgatatccggaatctgactatcgtatcacgtacgggagagcattttcgattggcggatattgcagagattaaggaaagttatcagacgcctccgagcaataaaatgcggattaatgggagtcccgcggtgggtattgccatatctaccgtaccgactgggaatgtcgtaaatatggcggaagctgtaaaaggtaaaattgagcaattttcggagacaatgcccgaaggctttgagttacagacaatttacgaccaaggttacgagtcggctgtggcaaatcaaggttttatctggaatttgataatttccgttgtgacggtagttgccattctgttgttttttatcggattcaaaaatggtatcctgataggtagtggtctggtcttttccatttttgcaacgctgattgtgatgttggctcaagggatagctttgcagcgtatgtcactggctgcaattattattgcaatgggaatgctggtggataatgccattgtagtatccgattcggcattagtcaatatgcaacgggggatgcgcaagcgagtggccataatgcgagcttgttcctcaactgcattaccgttattagcggcaacaattatcgcaattttaacttttttacctatatattattcaccgcatataaccggtgagttgttgtcatccttagttgtagttatcggcgtttcgctgatgttcagttgggtctttgcgctgacgcagactcctttcttcattcaggagtttgttcgtcggccaagacccgacgaactaaaggatgctctttttgcaggtaaatattatgataagtttcgtgcagcattgaggtgggtgatttgtcatcggtatgcaacaataggatgcatggttgtgatgatgttgctagcggcttggagtttcaagtttattcccaaggtgtttatgccggcgttggataaacagtacttcacattggatgtatggttacccgaagggacaaaaatagaagaaacggaccgtcagataatggaaatgtcggaatatatccgtgggcaggaggaaacggaaatagtatctacttatataggaagaactccgccacgttattacttgtctaatgtatcttttggacctcagtccaattatgcacaaatattggtaaaatgtaaaacgtcagaactttcccgtcagttgcatacccggttacaagattcgatttcgctgaaatatcccgaacctctgattaaagtgaataagtttgaattgagtcctttgacggaggccgtcattgaagcccgttttcttggcccggaccctgctgtacttgattcattggtgggacaagctattgaagtgatgcgacgaaatcccaaagtagcggatgcacgtaatgaatggggaaatatgtcgttggtaattcgcccggtttatgatcctgtgaaggcgggtgcattaggtatcaccaaggcttcgatgatgcaatcagtgaaatcaatcaatgacggtctgcctgttggtatctaccgggatgatgagaaaaaggtacccgttttgttgaaatcaggtgatgtggatattactgatgtcaatgcattgggagatttctcaatttggaatggagaaagatcggctccgctttcgcaagtcacggaacgaatagaaagaagttgggaatttcctcaggtacggacatataaccggcaactttcaatggctgccatgtgtggggtgaaaccgggctacaccatgtccgaggtacatggagaaatacggaaagaaatagagaaaatccacttaccggaaggatacaccttcttttgggattctcaatataaagatcaaggggaggcgatgcaggctattgcgaaatattttccgttggcatttcttgcattgatagtcattttggtggccttgttcggcaatttccgcgagccggttatcattctttgcattctgcctttgtctttgataggaattgctgttggtatgttgctgacagggtttgattttggattctttccgatagccggctggttaggtttgcttgggatgataatcaaaaatgtaattgtgctgattgatgagataaatgttcaacatcggagtggaattgatttatatacatccattgttgaggctactgtttcccgaacccgtcctgtgttaatggctgctacaacaacgattttcggtatggtgccattgttgtttgatgttgctttcgggggaatggctgttactataattttcggattgacatttgctacgggattaacgctttttgtcacccccgccttatattccatgttttataaagtaaaaggaaaatgaagatgagaaaaggaatatttaacctgttgttttgtacttttgtctttttgtctttgccggttcttgcacaacaaagcacattgctggagaaatatcggactatggcattggactataatcacgatttgaaagcagcggaaaagaatatcgctgccagtatggaagtagagaaatctgcacgtgccgatttgaaaccgaaactttccggtgctgccagttttcaatacaccggaaatcctatggaactaactttggatattccttccatagggttgtcgaaaacagtggaaggaaagaatttaaactatggaggttctctgtctattttacaaccggtttatacgggagggcgtgtactggagtccatccgtatggcgcaacatcagcaggccttggccggtaatcaggcgaaagcactgaatgatgctgtttgttaccaaacggatattcagtattggagtgccgttgctcggcaggaaattgttgatgtcgccgaagactttcgcaattcgatagcagccttggttaaaacaataaaagaaagggtagaagtaggactcgttgacccacaggacctgttaatggcagaagtgaagttaaatgaagcggaatatcaattacttcaggcgcaaagtaattttgaaacaggcagaatggcattaaactcaatgattggtgtccggctggaacagcctacggagttggatgcgcagataccgatagtagttgtcagcgattctctgtggttatctaccgggatgggacgtccggaaatacaaatggcttatgacaaaattcgtattgctgagagcacaaaaaaactgaatgattcgcaattcaaacctcaattctatgtgggagtagaaggtagctattcatctcccggatacaatttcaagaaagatttagatccaaactacgctgtttatgctaaagtgtccgttcctatttttgaatggggaaaacggagaagcgagaagcgtgtttcttccttccgtatcggaatggcggaagataatctaaataaagtcgtagaccgggtggaattagaagtgagtgtagcgcgtaaggcattgtcacaggctattgaacgtgttcgtttgagtgaaagttcgctggctaaagcagaagaaaatgaggcaaaagcagtagaacgctacaatgaaggaaaagtttcggtggtggaagtgattgatgcgcaaacctatcggcagacttcgcaggtgaactatgtacaggcaaaagctgctgcacaaggacattattcggaattaataaaagcgctccatagttatgattatcgctaaaaagcagtaactttgtgtgaaaagaatcgtatgaatataaaattgaaccgtatatcatatagtgcgctgttttcagggctaggcgttttctcttttttcctgctagccaactatgcggaactttccgatagagtatcggatgcgttatattcggtaggaatgtttctgttttttattcttgcgttcaatttgctcggatattctactattcggctgactacatgggtagataatcagtattcggtgaatattcatcgtcgttggaaactgatttttatttatacaatggtgatgttgatgttttttctgctcaattatggattgttggtaactgccaaattcttggtcggtgcttcacatccttttgtttttcctaatggcgggtggcgtatcttgatattagtttggttggtggaactggtgattttaggtttgctgcttgccaaccgttctatgcagcataccctcaaattgcagaaacaggcggctgctttgcaggaagaaaataacatagcacgctatacagctcttcaaaaccagctaaacccccattttctgtttaatagtttgaatacgttgatttcagaaatcagatataatcctaaaaatgcagaactcttcacacaacatctttccgacgtatatcgttatactctccagtgtcagaatcagcgattggtgacgttgcaggatgagcttggttttcttgattcatatatttttcttcatcaagttcgtttgggtgattgcatttatgtccacaacaatgtgccggatgagtggaaagagatgaagatgccgcctttgacgcttcagctattggtcgaaaatgtaatcaagcataatgtgatccattcggggaaaccaatggttatcgagctgtgtaatgtagaagaacctccgactctgataatctgtaatccgattcgaccaaaaaaatgcggagtcgtttcgggaatggggctgaaaaatctttccgcccgctataagctcctttgtaatcaggatattgtgatagaaaatgaatctgataaatttaccgtaaaaattcccttgctttcatgaataagataaaagctgcaataatagaagatgaagtgccggcggcacgtttgctacatgagatgatacagtcgcttcgcccggattgggaggtgatgattctgcccggtactatcgaagaatccgttgaatggtttcgtgtgaatcctcatccggaacttttatttttggatattcagttgacggacggcaattcatttatgttgattgaacaagctcggccggatagtatgattgtttttaccaccgcttatgacgagtacgctgtccgtgcttttgcggtgaatagcattgactatttgctgaaaccgattcatcaggaacgtttattgcagactatcgaacgtttcgagagtctcacagagaaatatatccgtgattttaatcgggagagccggatactggaggtgttggaaagtttgtctgatacgcagaagcttccggtggtagagaataaaaaatatcgcacccgatttcttatttcttccggtaataaactttttactttggcggtaagtgatgttgcctatttctattcggagaacaagctcacttttgtagttaccaagaataatagagaatatgtcctggactttgctttggataaactctgcgaacaattgaatcctgatgtcttctttcggaccaatcgccagacacttgtttcggtagatgccattcagcgtatcgaaccctattttttaggtaaggcggttgtacacgtcctaccaccatttaaagataaaatcatagtcagtaaagacaagatagcggctttcaaggtgtggctgaattattaagcctcgcttttacaataagataatgcgtttctgcatgatatctattaatacaatttgcggaccatattccttgaacatatttacggcttcttgtccatcccaggcatgtattaagtggtaatcatattttagtatcgactcgaacagtttgtaattactttcattgtcttctgcaattagaattattagtttatcttttgcgattgtaatattttgaatttctttttgaggagctttttctatggcttctatctgcttatagggtaatcactccgatagtaccgccaagatgcttgatgatacttctgcaaatagacagctttaagcctgtgcctttcgagaaggtattcagctttacaaaacggtcgaacacctggttaactttatcaggagcaatgcccattcttgtatcggtcacggaaaattctatcttattgatttatagcatcgtatatgaagcgtttttgctttttaaatcaacaggtcattcctttaaaaggaacgacctgttgcacaccgagaaatgcattgtttcttttaaaggaacgagcttctctataaacagactgcgttgagttaatttgtttgtttacatttattattatatattcctgtcatttggctttatttcagtgcttcaataacttgtggtaacattgtccaaatagtattttcatcctgtgcagtaaagaagttaccgtcaatctctgatttttcatcggtagctattccgttttggatagccggtttggctaacggatgaacagccactttcttacctttcgttatccctgtgaagtcaaacatcattgcaccggcacaatgtccgatcattattttgcccttatctccgaaagttttgataacttccattagatctatattataaggtttgtctgcattctgctgaaatacaggtacagcgtctccgcatgagaaaacaaatgcgtcaaactcatcctcatgtcctttcaaattagcaatcacatcatctgttgtcagactgattcctgaatttgttttaatctccttcgtatccgatacggcaaatactttatatgaaatgccattttcaaaaaatgcttccaggtattggaataatccacaaccatttaccggatttactgctaaaactgctactttctttgccataatcataattatttaaatgaaacaatagttattattagtaagtttattacttttgtgatgcaaatgtatcttcctttgttgagaaaagcaagaacgcacctctgaataaggaagttacatggaagtaactattgttgtaattcagttaaatacaaaacgttaaaagatgaaaaactttcacccgacaggaaattgtccagttagagatgtgctcagccgcttgggagataagtggtcgatgctggtgcttatcactttgaatgccaatggtactatgcgttttagcgacattcataagacaataggagatgtttctcagagaatgttgacggtcactcttcgtacactcgaatccgatggattggtggagcggaaagtgtatgcggaagtacctcctcgtgtagagtataacttgacggatacgggagggactctgattcctcatattgaaggattagtagggtgggccttggagaatatgaatacgattttggaacatagaaaaaatgattaataataggcggttgtatgaatattccctatacactcatacttaatatttgtaaactcctcatctgtcattatgcatcgtaaaaaattccattccgtaatttttcggtgctcttatttaatggtatttttcacatagtacaaggttgtttctgcttttgatttttcatattacaaagatatacttatttatatggtgtttttgtttgcactgtgatatttttatatctttgcgaggagagctattcaatatttaaaaacatggagataaagaaagtaatttcagataagaaagaattcctcgaattgttactcttggctgatgaacaagaaagtatggtagaccggtatttggaacgtggcgatatgttcgttctgtatgacaacggattgaaagcagcctgtgtagtaacccgtgaaggggaaggcatttatgaaatcaagaatattgctactgttcctttttttcaacgtcagggatacgggaaacgtttaattgaatttctattcgagcattatcaggacaagtgtactgaaatgttggttggtacaggagatgtgtcttctaccatatctttctacgaacattgcggttttaccatttcccaccgtgtagagaatttctttaccgacaattacgaccatccgatttatgaagaaggcaaactgttgacggacatggtatatttgaaaagaacattctaatgctatttcaggattatttcagtatcatggtttttctttgccgaggataatttgttatctttgcaactttaacccgaaaatcaatgagtagcaaatttataattattagagttttattgtttgtgttgttggttgttggtacaacttctgccatgatcgcacaagataatgatttcgcaacctggactaaattcaaagtaaatcataagattgactcccgctttgctgtttccggtgatttggaattgagaacggaagatgatatgagtgcgattgaccgttggggaatttctgtcggaggtgattaccgtgccttttcgtttttgaaatttgagattggttatgaaacgcattatcggaacttaggtgaaatagggtggaagttcagacaccgttatcgtattggagctacggccagttttcgttatcaatggctcaaaatgtctttgcgggaaaggtttcagcagacttttgatcgtggagaatcagaaactcgtttacgttcccagctgaagttgggatatgctccccaaaaaggaattgtttcaccttatttctctattgaaatttatcaaagtttggatgatgcacctttttggcggacagctcgtttaaggtatcgtcctggaatagagattgatttaactaagcgctggtctcttgatgctttttattgttatcaatatgaatcttcgcgaggtaagcatattgcaggggtagaggtcggttattctttttgagaatcatcagattgctaatataataaggtgaagtaggaaatctctgacatatatcagttttttgtaagttattgattatttagtatttaaataaaaatataaaactttccaaataaaaatattctctaactgaattataatgtatactttcgtcccttgcatttcaaaatgaagtgctggaatcaagattctacagttgcaacagacgtgttgtatagtatctcataaccgcaagctaatactttctcttatgtcattctttctgttctatcagagatttctaatgggaaattaataaaaaataagatgaaagtatttcattatttacccaagaacataggttcttttgctattttctctatcttgctgactgcttgtgtgaaccacatttcggaagaaaatgaagcgataattgctgatggaaatattccattgaagtttgtaactgacatacatgaattgactaatactcgtattgtcggtaatagttttgaagaaggagaaggagtcggtttattcgcacttgcgggttccactacaatgcaggaggaacgctatgtagataatcttcattttgttcgttcttccggaggcgagtttctgtcggatgagttggtatattatccggatgacggagtgacccttaatttagtgagctattatccttatcggcaagagggagtggcgataggagagagcacgatgtcggtatcagtagaaacaaatcaagaggttgctgctgattattctcgttctgattttttggttgctatccgagacggtgtttctgcaagcatagatgccattcctttgacttataatcataagttttttcgtctgaagatagcgattgtgccgggtgaaggtggcaatgtggaagatttattggcagctgatccccacctttcggttagtggcttttatacaaaagcaatatatgattttcagaagcagtcttattccgattattcggaagaaaatgttattatcccggccggagtatggcagatagaggctgaaaagaagttgatagggaaagaacttatcttgataccgcaagaggttatggccggatatcagtatgtgacgctggaagttgaaggcaaacagtatattagcttgttaccttcaactctgaatttgcaggaaggcaaacaaagagagctggaaataacttttgtagctgctgaggatattttgatgaacaaagttagtggagaaattagcgattggaaaggtgatgaaactgatcatgccgaatcggaaaatcttcataaatatatagatgtgtcgaaattgacgtttgcaaaatcgaatgtatataaagtcttgaacgcaggaaaacaggtggctgaaatatgtaaggaatatctggtgactccgtacttttcttctcaggcaatagttgcttatccgatgaagaatgatgctactgctgatttatctcaaggagtggtagttcaacttctagggcaatctggtaaggtgcatggtggtaaagtgtcgtggaatatagatgagcattcgttgacttatattgccgggactttgcctgtttataataatatttatgtattggcaaacggaaaagttactttgtcaataacagaggcagatgatgtgttacaggtattagcattagatgatgtggctcgtgatgtacgtggaggagtaattcataattatccgttggtgaaaatcggaacacagtattggatgcggaataatctggaagctgctttgtttgcgaatggtgatgaaattccgaaattgaatgaagttactgaaaatgctgtcgggtatttgctatcctgtacaaataattacctttataccgctagtgtagcattatctcctgatttcttgccactccattggaatattccaaattgggaggactggaatatcttaaattcttacctgaaaggggatgtttctttattgaaatcgggtgaatgggtatctatagacggggcagaagtgttgcccgttaacaatgattcaggttttaacggacttcctgtaggaatgtattcttatccggatctaagtgttttagaaggcaagtttttaggatattggacactggatgatacaaatacggaaatggctgaatctgtcttttttttgaaaagcaatgcaaatactatggaaacggccacatcagctgttgaaagaaaggctttttctatccgctgtatccgaaagtaaatctatggaaatgattcgtctttttcatattttgcctatatttgggaagtaaaactaaataatggagagaattatgaagaagataataaatccttggaaaggtttggaaggatacaattgttttggttgtgctcccaataacgaagccggagtaagaatggaattttatgaagacggtgacgaaatcgtgagtatctggaaaccgcgtcctgaatatcagggttggattgacactttgcacggcggtattcaagctgttttattagatgaaatttgtgcttgggttgtgttgcgtaaattgcagacaacgggagtaacttctaaaatggaaactcgttaccggaagtctgtcgatacgaaagattctcacgttgtactgcgggctgctatcaaggaaataaaaagaaacattgttatcatcgaagctaagctatataataaggataatgaagtatgtacggaggcagtttgtacctactttactttctcacaggaaaaggcgaaaagcgaaatgcattttttgcactgtgatgtagagccggaagaaatactacctttaatttgaaataaaaactcaagtttttgtgataaatgtttggaagtatgaaacaaatgctttacttttgtcgcagttaataaaagaaatatgaaatatacagctacacatcatcatcatcattttcctaacgaataactcggtgggcatagatgatattgtgtatactctatataacgataacaaaggcttgccgaatacggtaagcctttttttattcccttaattcgaatagtaattaataataaataattaaataagatcatgttaagaattgcagtacaggccaaaggacgtctttttgaagagacaatggcacttttagaagagtcggatatcaagttgagtactactaaacgtaccttgttggtgcagtcttccaattttcctattgaagtattattccttcgtgatgatgatattccacaaacagtagctaccggtgtagccgatttgggtgttgtcggtgaaaatgaatttatggaaaaagaagaagatgctgaaatcattaaacgcttgggattcagcaaatgccgtttgtcactagctatgccgaaagatttggaatatccgggattatcatggtttaatggaaagaaaattgccacttcttatcctgttattcttcgtaatttcctgaaggaaaagggcgtgaatgcagaaattcacgttattaccggttccgtagaggtatctccgggcattggactggctgatgctatttttgatattgtaagttccggctctactttggtcagcaaccgtttgaaagaagtggaggtggtcatgaaatctgaagctctactgattggtaacaagaacatgagcgatgagaagaaagaagtgttgaatgaattactgttccgcatgaatgcggtgaaaacagcagaagataagaaatacgtattgatgaatgctccgaaggataaactggaagaaattattgccgtcttgccgggtatgaaaagtcctactgtcatgccattagcgcaggaaggctggtgttcggttcatacagtattggacgagaaacgtttttgggagattatcggaaagttgaaagctttgggcgcagaaggtattctggtattgccgattgaaaagatgatcgtgtaaaatacgtggaaataaataatctatgctgaagaatgaaagtaattaaataccctacaaaagaccagtggacggaactcttgaaacgtccggcactgaatacggaaagtctatttgacacagttcgttccattatagacaaggtaagggcagaaggtgataaagctgtactcgaatatgaagcaacctttgataaagtaaccttgtcctcacttgttgttactcctgaagaaatacgggtagccgaaacattggtgagtgataaattgaaagccgctatctctttggctaaacagaatatcgaaacatttcactcagctcaacgctttgtcggaaagaaggtagaaacgatgaacggtgtaacctgttggcagaaagcagtggggattgagaaagtcgggctttatatcccggggggaactgctccgcttttctcaaccgtattgatgttggctgttcccgcaaaaattgcaggatgcaaagagatcgtactttgtactcctcctgataaagaaggaaatattcacccggctattctttttgctgctcaactggcgggagtgagcaagattttcaaagcaggtggtgtgcaagctatcgctgctatggcctatggaacagaaagcgtacctaaagtatataagatcttcggtcccggaaaccaatatgtgacagctgccaaacaattggtcagcttgcgtgatgtagctattgatatgcctgcgggtccatcggaagtagaggttttggctgatgcatcggcaaatccggcttttgtagctgcggatttattgtctcaggcagagcatggagtggatagccaagctatgttgattacaacttccgagaaactgcaaacggaagttatggctgaagtagaacgtcaattagctgaattgcctcgtcgtgaaattgcctccagatcgttggaaaacagtaaactaattctggttagaaatatcgatgaagcattggaactcacgaatgcttatgctcccgaacacttgattgtggaaacggaaaactatatggaagtagccgaacgggtcactaatgccggttctgtcttcttaggtgctttgactcctgagagtgcgggcgattatgcttccggcaccaatcataccttgccgactaatggatacgcgaaagcatatagcggtgtaagtctggatagctttatccgtaagattacattccaggaaatccttccggaagggataaagaccatcggtccggctatcgaagaaatggccgccaatgaacatttggacgcacataagaatgccgtcactatccgccttaaagcaattaataagtaataactgaaaactaaaagagtattgctgatgaaaacgttacaagaactaacccgcccgaacatttggaagttgaaaccttactcttcggctcgtgatgaatataaaggttatacggcttctgtctttttggatgcaaacgagaatccgtacaatacacctcataaccgttatccggaccctatgcagtgtgaactgaaaacactgctgtcgaaaataaagaaagtgtctcccgaacatatttttctgggaaatggcagtgatgaggctattgatttggtatttcgtgcattctgcgagccgggtaaagataatgtggtcgctatcgaccctacttacggaatgtatcaggtgtgtgccgatgtgaacgatgtggaataccggaaagtgctgttggatgataactttcagttttcggcaaataaattattggcagctgccgatgaacataccaagctgattttcctttgttcaccgaataatccgacaggaaacgatttgattcggtctgaaatagaaacactccttcgcgagtttgaaggattggtaatactggatgaggcatatagtgatttctccgatgcaccttcttttctggaagaattggataagtacccgaatcttgttgtattccagacattctccaaagcatggggatgtgctgccattcgtttgggaatggcatttgcgtcagtagaaataatcggtatcctgagcaaaatcaaatatccctataatgtcaatcaactgactcagcaacaagctatttctatgttgcataaacattatgaaatagaacgttgggttaaaacgttgaaggaagaacgtgattatctggaagaagaatttgagaaattaccttgcaccatcaaactgttcccgtctgatgcgaacttttttctggttaaagtgacggatgcggtgaaaatatataattatcttgtaggtgaaggtatcatcgtgcgcaatcgccattcggtttcactttgctgtaactgtttgcgtgtaacagtgggcacccggatagagaacaatacgttattggctgctcttagaaaatatgaaggataatggacacgaagaagaaagtattatttatagatagagatggtacattggtcattgaaccgcctgttgattatcagctcgattcgttggaaaaactagaattttacccgaaagtattccgtaatctgggctttgtccgcagtaaactcgatttcgagtttgtaatggttactaatcaggatggactgggcacttcatctttcccggaagaaacattttggcctgctcataatttgatgttgaaaacattggcaggagaggggattgcgtttgatgatattttgattgaccgtagttttcccgaggataatgcaccgacccgtaaaccgcgtaccggaatgctgacaaagtatattgataatcctgactacgatcttgccggaagttttgtgattggtgaccgtcccactgacgtggaacttgctaagaatttgggatgtcgtgccatttatttgcaggactcaacagaaagcttgaaagaaaaaggactggagaatgtttgtgcacttgcaacaacagactgggatcagatagccgagttcctttttgccggtgaacgaaaagcagaggttcgtcgtacaacgaaagaaacggatatttatgttgccttgaaccttgatggaagcggcatttgcgatatttccaccggacttggctttttcgatcacatgcttgaacagatcggaaaacactccggtatggatttaacgattcgtgtaaaaggagatttggaggtagacgaacatcatactatcgaagatactgctattgctttaggggagtgtattaatcaggctttaggtagtaagcgtgggattgagcgctatggctatgcactgcctatggatgattgtctttgtcaagtttgtctggacttcggtggtcgcccttggttagtatgggatgctgagtttaagcgcgagaaaataggagagatgccaacagaaatgtttcttcattttttcaagtcattgagcgacgctgcaaaaatgaatctgaatgtcaaagcagaagggcagaatgagcatcataagatagagggaatttttaaagcccttgcacgtgccttgaaaatggcaatcaagagagatatctatcattttgaacttccttccagcaaaggggtactctgatttcttaaatacacagacttatgcagaaacgaatcctgttaagcctactttggggagtaatcttttctatttctctttttagtcaaaacctgaaagcagagaagattactcttcccgatagtaaactgaataatttatataagatagattcaggtgtatatcgttccgaacaaccttcacactcggactttaaagctctcgaaaaatatggtattggggagtctcttaatcttcgtaatagacatagtgacaatgatgaggcgacaggaacgactgtgaaacttcatcgagtaaagatgaaagcgcactcggtagatgaggaacagctgataactgcattgcgcatcataaagaatcgtaaatcgcccattgtcattcattgtcatcatggctctgaccgcacaggagccgtgtgtgctctttaccgtattatattccagaatatctccaaagaagatgcaattcgtgaaatgactgacggaggctttggctttcatcgtatttataaaaacattattagaagaatcagggaagctgatattgaacgaataaaaagagaagtgatgactgttggaggatcgtactagtaccctgtttgtactaccgcgctgtcacaaccgtgccatcgcattggcacaactatgccatgccgttggcacagttgtgccaatggggtggcacaagcctattaataggatgcctataaagcttctatttctttaagccacatggctgaatttgcatcgctcggcattcgccaatcccctctcggactgatagaaatactgcctactttaggaccatcaggcaagcaggaacgtttgaattgttgattgaagaagcggcggaaaaagatagccagccatttcttgattgtctcttcattataattacctttgaatgcgatgtttgccagataataaatctttgaagggcggaaaccgaaacgtaggaaataataaaggaagaagtcgtgtagttcgtaaggaccgactaggtcttccgtcttttgtttgatttctccgttttcgtctgccggaatcagttccggactgataggagtatccactatatcaagcaatgtggtttttgaatcttcgtccacaccattttctgccacccactgtaccagatattttacgagtgttttggggacgcttgcgttaacgccatacatagacatgtgatcgccattatatgttgcccatcctaaagcaagttctgataaatctcctgtacctattaccattccccaggtttgattggccacgtccattaagatttgtgtacgttcgcgtgcctgtgaattttcgtaagtgacatcatgcacatttatatcatggtctatatccttgaaatgttgaatacaagcgtctttaatactaatttcacgaatagatattcctaatgatttcatcaggttgatagcattatggtaggtgcggtcagtcgttccgaaaccgggcattgtgattccaagaattccttttctggataatcctagtttatcaaacgttttcacgcagacaagtagtgcaagcgttgaatccaatccaccggaaattcctactacggcagtcttggctcctgtgtggacaagccgttgtgccaatcccgctacctgaatagcgaaaatgtcttcacagtgttcgtttagttctttcccttgtggtacaaatggatgtggatggaaacttcgggtgagggttagttctttactgtttacaaattctgtggcaacagagactgctctcttgtctcttaaattagcttgattagccgcgaaagttgtgttgattctacgttctgcgcgtatacgttctacatcaatctcgctgataataagctgttcttccatgctgaatcgctcactgcgtgcaagcagacttccattttcgtaaatcaatccatttccggcaaagactacatcagtagtagactctccgaaaccgcaagatgaaaagacatatcctgcgatacagcgtgcagactgttgactgatgagagaacacagataattgtgttttccgataccttcattgtctgccgacatattgaataggatttccgccccttgtaaagctagcgatgagctgggaggaatcgtggaccatagatcttcacaaatttcaattccgaaagtagtatctgaagtttcaaaaagcaaattagctcctatgggaacaatttgtccgcataggcgtacattgtctgttgttagttgaatcgcggaggtgaaccaacgttgctcatagaactctttatagttagggagataagttttggcggtaacgcctagtacttttcctttctggataactactgcgctgttaataaccgtcgaattgacaactaccggcataccaacaatagaaataatgtccaattggcgcgtattattcagaatttgcattaatcccatttctgcttcttccagcaaaagctgttgaccgaacaaatcgccgcaagtatatccagtaatactcatttccgggaaaatgatgatttgcactccctttccttcggctactgcaatcaggctttctattctctctacattgaatttacagtcggccactttcacgtgtggcacggctgctgctactttcacgaatccgtagttcatcttatacctttttatatataatgagtgcaaaaataggaaaatagttttgaatatttatcttttctatggtgaatcctctcaatgaggtccttggtatgtactataatactgttgtttagacaattaatatgcttgtcaaaatgaaagctaatgggtgtaccctttacgataagcttggttttttgtgccttttgtattctatgtaggctttgtttagtgttaaaaagatataagtggaaatttggtataaaatttgcgactttttgtttcttttgtttaactataatatttatatttgtagccaaatagaacgtaattggaagttcttagcacctgaacggaacaagtaatattggttttgaatttataatttaagagagcagatggacatacattcgattcacacaacagtaacacgaaaaatctattcggatatttggcgtaatattaaaaatcagccaagttagttttttcccattctatttttagaaaaaagtatttctgcccaaggtcaatgaaaagttatgctttaaaattggtctgtgggagaggaggtattattttatacgtaaagataccatatacgtatttcattagtagatgaatctataaaaataaatcaatttcattaattttaattttaagtatcaaagatgagaaaatcaattctcttgtttgtactctttactctgacaaatatccccctgttgctttttgcacagggtgggtatcaggtaactgggcatatcatttcatcggaagataacgaaccgatgattggcgtgtcgattgcagagaaaggtacatcaaacggagtaattaccgatgtaaatggtaattacagtattaaagtgacgaaatctcccgccactttgcagttttcttacatcggaatgaaaacgatagagaagcaggtaactgcttctactcgtctcgatttgaagatggagagtgacgcacagcaggtagatgaggttgtagttgtagcctatggtgttcggaagaaaggaactataaccggttccatggcggtagtaaaggccgatcagttggagaatgtaccagctcctagtttcgatcaggctttacagggaaaaacgccgggacttcaggtaatttccagtagtggtgagcctagtgcatctgccgactttcagattcgaggagtgaattctattaatgcgggaacaactccactttttattttggatggcattgctattactgctgatgttttttcagcaatcaatcccaatgatattgagagtgtttctgtgttgaaagatgcttcttctacctctatatatggtgcgcgtgctgccaatggtgtagtggtaatcacaacgaagcgtggccgaagcggtacgaatggaaatattgtggctcgtgcacaatatggtatctctaaactggcttatggaaaatgggatttgatgaatacaactgaacgccttaattatgaagaagaaatcggtataagaaaggcgggtacgtatgatcgtgaattattggaacgtaccaatattgattggcgtgatgtggtatataatgatgctgctccttttactagtattgatttacaagcaggtggtgctacgcaaggaggattcaactattatgtttccggtaatattcattcccaggacggtatcgctttgaattcagattataagcgctatactttgcgtgctaatttagaagcaaaagtgaataaatggttcaaggttggcacaaatgcttcttttgcttatgaagattatagtgaagcagttgatggtgactataatactgtcactccaatttcagcttcccgttttatgcttccatattggaatccttatgccagtacgggagctgttgcaagtataaatgatggcacttggttgggaacgaatgtgaacccgttggagtaccagaatagtaatccttcagataaaaatcgttggaaaataatagcttcggcgtatggtgaacttcgtccgataccggggttaactatcaaaacattgggaggtgttgactttttagatatgcgtactaatatgttttcaatgccatcctatttacctaattacggtgaaggaactgttggacgcgctttctcacgttatacgaatataacatggtcaaatacggcaacttatctctttgatataaaagaagatcatcattttaatgtcatggtcggtcaggaatgggtggataaccagtctgatggattctctgttgtcactcgtggacaaagcaatgataatctgttgacaatgtcgactgctgcacgtgcggagagttacaccgatacaatgaatgaggcaaggtatctttcattctttggacgtgctgaatataattatctgagtagatattatgctgatatctctttacgtcgtgatgcttcttcacgatttggtgtagattctcgttgggctaatttctggtcagtgggaggtatgtggaatgtcaaaggagaaaagttcctgaagaatgtggattggctgacaaatgctcaacttgctgctagtatcggaacttctggtaactcatcaattcctgcttatgagcatcttgcactggttgctggagggccgatttatggtattgttaatgatgttgatatgacaggtatagctccttattctaaagggaacgaaaaactaacttgggagaaaacgttaacaaccaatatttctttaaaattaggtttctttgatcgactaaatttggttgcagaattttataataagcagactaatgatatgttgatggaagtacctgtatcggcagtgggtggctatacaagccgttggagcaatatgggagaaatggtcaatcgtggtgtcgatctttcttttgatatcgatgttcttcgattgaaagattttcgttggaatatttctgcaaatgcatcttataatatgaatgaaatcacggaattgtatgatggacgtgatgagtacgatttgggttctactgctctttaccttaaagtcggacattcgtatggcgaattctatctgaatcgttatgccggtgtaaatccggctaatggtgatgcactttggtatgataaaaatggaaaaataacgaatgaatttaaagaagaggataaggtactgataggtaaaagctgcaatgctccctggcaaggaggattcggtactacactttcttggaaaggtgtgactgtttccgcgctgtttagttgggtcgcagatcgttatatgatgaataatgaccgttacttcagtgagaatgcagcggtttattcgagctataatatgtcaagaagactgttgactgatcgttggaagaagccgggtgatatggtaacaatgccccgttatgatgtcccgatgcaatttgatgatcgaatattggaagatgcttctttccttcgtttgaaaaatttgagtgtatcttatgagttaccgaagaatttactgaaacctactaagattattgatcgcgtacgagtgttcgcacaaggccagaacttatttacgtggactaagttccaaggcatggatccggaatctactgctaattattatcaggcagcttatccgatgtcacgtcagttctctattggattagaagttagtttctaggcgtttttctatacattaatataatacataaaatgaaaaaagtaaaaatactattcttattgatgtcgctggtgtttactacgacctcttgtgatatggatttgacaccagatagtgccgttcctgaacatgaggcattgcgtacgatagacgattgcgatgcatgggtggtgggcatttatagtgcatttaaaaatagtgcattatatagtggctacatgactttgctccccgatattcaggcggatatggcttatgctgctttgaatactaataatggattctatactaatatttatcaatgggatattaagtctacaacagatgagataattgctgtatacaatggactttatacaattgtagcccgttgtaactttttccttgactataaggatcaggtagaggttaatttgaaaacgactgccgacaaagataatttcaaaaagcgtttgggcgaggtatattttgcacgtgccatggcttatgcagaactgatccgtttgttttgtgaaccgatgacttcggtaaatgccgatacggaaaatatgggtatctgtcttcctactacttatcgggatgatgttccgaaggtaaaacgctctaccttgcgtgaatcctataatcagattatcagtgatttgaagagtgccgaagataacttaccggattcacgtacagtggctgatagtcattatttcagtaagggagctgtatatgctcttcgtgcacgtatctatatgtatatgggaatgggggatttaaagcgtgatagaaataatgaatatttgaagaaatcagtagaagctgctacaaaagtgattaagttgggagtgtatgaactttcggatgcaatcaataatgcttttgttattgactctaaatattacacggattatcaagtgatgtggatgcgtgatgcaagtgacgaggttatttggaaaataggcatgagttctactagttatggtggtgcattaggaaaagaactattgtcgtataataattcaacctataatcccagatatcattttgcagaagcaatcttggacttatatgatgagaatgataagcgtgcttctatattttgcacaccaacaaaagatgtaaatggtgacgaagtgtatctcattaccaaatacccgggaaatacagatcttgatggaggagatatccccagatttgttaatatgccgaaacctcttcgtctttcggaagtttatttggtacgtgcagaagcctattattggttgaatgatgatgaaaattctcagaaagacctctcttcggtaatgcgtaagcgcatcagtggctttggttcattaggtgtttccggtgatgatttgctgaaggaaataaagaacgaacgtgctcgtgaattatatttggaaggtttccgcctgtccgacttgaaacgctggcatgatcctatcaaacgtcagaagcaactatacagtttacaagggccttataataatgaaatggaagtgaaatatacagatgcaaagtatcgtttcactacttggcctattccaaaacatgagatagaagcaaccaatggtttggtggttggtaatgctagtaataattaatcaaaacatataacagattaaatgtatatgaagaaatttttgaatcttctgttggcgactccggtagcggctgttattatggtagcttgtcagtcggatgaagggattacatattcgggacctgaatatgtgatgttctctgatacggtttatacgatgcctgtacaggataaggaagaaacctttagtgtgccggtggctgctactacaacagccgattatgaccgcaattacgctgtagagattgtcaatgaaaaatcaactgctgttcgtggactccatttcgatttcgttgataattctaataatataacgataaaggccggtgagcgtgtcgcaaatgtcagtttgaaaggacattatacaaacattgcacgtgaagatagtctggttgtaagtttacgtttagttgaacctaaagcacaggaatggaatttatatgggaatactacacgtgtggatttagtgaagtgtcctccgttcaagatgaatgaattcttgaaaataaagaaggaggacgacaaggtgaatctgataatgcttgcttctttcccgttcgatagcagtatgggacaatattctgctcatggatataagaaagatgatcatacactgatattgacggatatgtttggtgaatcgtcttcagaaaaaattcgtattatttttgatgagacagatcctttggacttgagaataacggttcctgaacaagcggctttccgtgaaagtaactatggatatgtatgggtacgttcggtagaacaatatccttcttatttcaatactttcgataatttctttgtgctgattctcgaggcttatgtaccgcaaatcggtagcttcggtgtatatcagtatattttcgaatgtattgatgctgatgaagaagctgataataacaatggagctgcaacacgtggtttctccagttatacttcgacttttaaattgaataagtactaatttaaatatagataatatgaaaacgacaatgatttatttgcgtcagcttctcgctttatgcgtagtaatggttgcgtttgcagcatgtggggacgatgaaaaaaatgaaggtggtagttcctcggcttccggcattcaattgaatactattgataagattacctgtttatcagaagagtctactattgatattaattttacagctggtagtgattggacagcagcctctagtgctacttggttgaagttgaataaattaacaggatctgctggtgatatcactcttacagcaactattcatgagaatgaaagttttgatattcgccctgctacaattaccattaaagataaaagtacaggaaaagaagcaactatttctgtgaagcaggcatctaaaggtactattctgtttttctcaagcgctagtcaaaacggacagacttttgataatattcaaataagtgatgatagtaaagcttttgttgcgactgtaaatgttacaagtaattatgattggactgtaaacacagataagagttggctgagctattcaaaagcagcggatgctaatgaagatggttcttatacagtgactttctatgctgattttgataaactttatgagactggaaaatatggggcacaaagtgctgtggctcattttgaatatacatcagcaactcgtacacctgctactgtcgattatcaattggactttaaaggaattactccatctttgacatttgatgtggataaagtagaattgattaatcaaaatggagatggtgagtatataggtcttgctactgtatattcaaatgtagcatgggattttgacgaaaaaccagaatttgttgaatctgttgaggtactgggggataatcaatcggctaaatttttgtctgtttctactcgaattaaattggttctaaaaaatagtgaaattgacacagatgaattgaatgctgttttaactttcaaagatgctacaactgatactaagttggataatatagaattaccaattgagtttgcaggagtcggtggtaaatatgtaacttacgatcgctcagttttcaaggataatgatccttcagatatgtatccatattttatgtttaatgcagatggtacctggactaatctggaagaatcttttagtgatatgaaagttgaaattacagctagtgacgccgatgacattgcaatatatgctgttaaatatgatgctaatatggatagagtgtatactagtgagatttggtggatgaaccataatgagtcggaacttactcgtgctaagctgggtaaaacaacttctatatttagtgtgggtgagcgtggaacagatgaatggagtgatccaacaccgcttgaagatcgtttctgtgctatattcatagtttctggaacagaatatcctgatgtatattctttgtttgatggaaatgatgaattgcgagaagggcttcgagataatatgcttattatcggtcaaaaaggcaaaaagttggattttagccaattctggtgtgaaggcttagatggtaataacgttgtaataaatgtaccggcggcaggtaaaaaatatgagtatccttatgaaggattagacatggaagctgctcaacctagttttattgttggtaaggatttatctattgaggatcatcaggtactgaataaggaagatgattatgattttactatttcacctatgcttataaattggggtactggtactttcatatctgaggagaagatagtatttgaggttggagagaacaaaaccggagaggaacgtcaatatacgtatgctattgttgcgaatgatggaacaaatccaggatatgtattagttcattttacattagtccaaactgcaaattaattcagaaaacgttatagtttaaataaaataatgaatctattaagaaaaatatatggattgtgtacggcaatgctctgtttggtattgattgccggctgttcggatgatgatgtgatatcttccaatggcacagcaggatatttaaaactgatggttgctccacaaacttcgactgcgacacgcgcaggaggactaagtctctccaatgttaggaaggtagaggtatccatgttatatggagatttacctgtgactcagtctttgaatttaagttctgcagaaggtgctgcagaactaggattagaatctgaaaagttggaactacgtgctggagaatataaaatgcaaagttatattctgtatggcacggctaaacctggtgcggaaacccccgaaatgttaatgacggtttatttggatgaggttgttcctttttctatatctaatgggcatgtgactgaagtcaatcttcaagtaaaatcttctgtatatgggaaggtttactttgatattcttaaagacctttctaattataaggaagaaacagataaagcaaaccaaggagtaaccagagcattcgatcaagatccagaactatttagttatgatgatatagcggaagttgatctttattataaaaagaaaggctctagtgaacgtgttgattatcattcatttaaagtatatacaaaaaagggtgagaaatgtctgcatactgatactgtttctacatgggaggctggtgaatatgaaattactcgctatatgttgtatagtgataaacgcactaatatgttgttggctggtgatttgaaagatacttatgtcaatgttgccccggttatgtatacccaagcgtcttttactgtaacttatccggagaatatgcgctctataaaggactatcttgccttgtacaatatctggataaatatggatggtccgaattggaaatatcagggagagtctttccctgcaggagccaattggcgttttgccgatcgtcctattgacgaatggggcaatcagccgggagtggaactatctaatacaggacgtgttaaaacattagatataggttcttttaatccggaaggagcagttcctgatgctttgggtgatttgacggaacttgaagcattgtggttaggtactcataatgatgcagctagtatagaaaatacagaagatatgtattatgtattgaatacgtacgaacttcgtcggagaggcattgatatctgtgcccgtcgtatggagattgctaaggaacgttctgcaatattacattctacttcaacgtcaaggatttatacaaccaagaaaccggaaagagttactttggctactcgaaaaacgtatgattttgcacagggaagcctctcaaatcgtattacttctattccggaaactatcggaaatttaaaacaacttacttatttgtatgtagcaaacggtcgtgtgagtgatttgcccacagcgttgaaagatttgcctgctttgacagatttggaattttataactgtcaatttaaaacatttccggatgtattgactaaaatgacaagtgttgtctctttgaatttcagttgtaatgcaacaatggaagctgacgagttatataatggtttgaatgcatttgtaaaaagtaataataaggtattacaaatactctatgtaacatcttgtaaactggaaaagttcccggaagagttagctaatgcgacaaagattggtttgattgatttcactagtaatagattgaagaaactggatggtacgaaacgcaggcttgctccagtccaagctttctttgatcacaatcagattgaggttattgcagatgatttttgtgaaacagatgatattgagaaattctctatttctaataattgtctgacagaattccctaatctatttaaagatggtgcaaagagcaagtatactgcatctagtgtcgatttctcagataatcatatcactcattttaaagaaggatttttaggtatccgtgcagaaactctaaccttgagtaaaaatccgcttggtgaaggttataaaactggttcaggaaaaaaactgtgtcggatgatgccgaaagaactgtctgaaactaaatctcagataagtcatttggtacttcagaactgtgagatagactctttaccaccggaatcatttaaaaatctggatattttggaggctttagatttgtcaggaaatcgtttacgctatttaccgaaagaatttgatacacgtactatggcctatgtctccggattgaatctgagttacaattgttttagtgtatttccgcttcaggcgtttactttgccattgttgaataaactatatttgacagaccagtcagatatagttgaggataatcgtggcaataaaaaagagatacgctgtttgaagaattggccgactggtctttctacttatccggcttatgcaactttacgcttgttggatatatcttataatgatattcaaaaaatagaagagtattcatatcctacattagtaactgctttcaatgtctctgaaaatccaaatattgaaatgactatacctagcgatgtttgctcgaagattggtagtgggctgtatacattaggatttgattcgaatcaaactatttggggatgttcgattttggatttggatataaataaatagtaaaaaggaaacatataattatgaattgtttatttaaaaatatgagaacaatgtgcttggcaatgattgctggcacattgctactgacggtttcctgtaaagatgatgatgaggctaccgtgacaggttttgcgctagatcagactgaagttggatttctgaatcatggaggagctattgaaataagggtagctactgacgaaacttggacagcaatatctgagaatgactggtgtatgttgactccggctaatggagtaggtagtgtcgtttgtgttattaaggctgactcttcgtatctgtataaagaacgttatgggaaaattactttctattcggaaagtggtaaaagtgttgaggtagctatcaatcaaatgggatatgaaccgactatacaattaactagtgaagaagtaactattccttcttatgcggaattggataaatcttacattgatattgaagctacttcaaatgtggcatttgaagtagttgctcctgaagatttagactggcttactttggagggagaatctaaatatactccttcaacgacaattcctcgtaagcagaaattccgttttagatttaagacttatacagagtttgataaagtacgttctgcacagataaaatttaatcagacaggaaagcctataactcgtgccggagaaatccagaaagagcttttaaagaaaattgtaactattacacaagaaaaggctcctcttatcattccgtctcgtgaaggtgattcattggctttacttgctatgagccgtactttaaatcttgatggatcaggatgggttacgagccgtcctattactcactggaataatgtggagacagaagaacgtacctaccattatagttatggtgatatcgataaagatagtactgaggtacgtgtgatttcattacgattctctatgtttgatacaaaggaatcagttccttatcaaataaagtatctgactgagttggaatcattctctgctgtcggaaactctaatgcttttacaaagaaaattgtgttaggtccggagattacaacattgaaaaatctgaagagtttgtcattaatgggatatggtatcagtgaattccctcctgaaatgaaaaatatgactcagcttgaagaattggatatgaatggtaataatttcctaaaattgccaatggatattttgaaaggaatgaccggcttgaaatatctgaattttggtggtaaccgggtaagtggttctgtgttaaatctgcagacagatattccgaagaaatatactttggaaacgattggtatgggtggaaatttacctaaggaaatctttgaaatggataatttggaatatctgtatctctcctataactatttttacggaagtattccggatatgggatatataggaggagttggcaagcataatataatgccgaatctgaaaatgctttccttaaatctgaaccggtttacaggtaagttaccagattggattttgtggcatcctaaattagcttgttggaatccgtttattcttttatttaatcaggaaggatacgataatttaggtaagttagccggatttagcaatgaacctgctaagatgtcagagttccctgaaggagcaaataatcgtgtttgtccggatgatgaagacgaggatgcaataacaacagctttaaatttgccttctttgactaaagaagatattgaaactgtacccttgaatggtcattggagatattacaagttgagaggtgagacttggggtactaaatttaataatgtatggtaaatatgacaacatatataaagaatacacttttactctgtttgatgttctgtgcaactatatttgtaggttgttcggatgacgataataatggagtaactcccctaccggaagggcagggggaagtgactttcaaattcgtgcgcaataaagtatatacaatctcaacattagaggatatggcgcggttgaaagtaactttagaaaaagatgggcagaaggttacacttccgactattgatttgattggagatattgattcgttgacttcttctgcagtacgattggaaaatggagattataaggtggtgaagtatactgcttataataataaaggtgtgcaagtacaggaagcgtatttggatgataataatacattatcggtcgaacatggtgtaatgcagacattctattttcctgtttcaatccgttttgtatatatcaataacgaaattcgtaatatgcttttcggcgtttgtgccgaagcacttgggaatgattcaacaaaatggccgaagtcttggcgtgtagaaaatgaagacttgttaacatgggagaatttggagtttgaagtagatgattatggagaaatttcttatttggcatgtattatctttgacggaaagactttcccgggtatgaagaagttacctgctacggttagcttattcccaactcttgaaggaattcagattatggatattccggagtttgaagagttaccagataatatggataaatcgccactttattcaattatgattatgaatacaggatttaaagctttcccaaagaattttgagaagatgaagaatctgcgttcattaagtgttattaatagtaaattaacagagttgcctatacgtttgagtgaacttccggaagttcgtgatgtggaaatcagtggaaatgaaattgctgaatttccgaaagaactggctgaaaaatggcaaaaggttgtttcgttacgtatgaatgatacaaagctaacttctctaccggaaaatatctttggaatgaagaaggtttcaacttttgatttctgcgataaccagggattgagcaatttacctaaatatcgtggtgataatacatatatgggtggtttgttccttgataactgtagttttacttctattccggaaatagcaaatacgagaatgcgtacattatctttggctaacaataagataacttcagtatctcaagaagtcgtgaacggtttgtcagatcaactattgaccttgattctggatgataataaaataaattctttcccacagatggcatcatcttcattgatagagttgagcttggataattgtggattgacagcaataccggacttatcgaagctgcccgaactttgcgtcttgtcattgaatagtaatcaaatattagaagtaaaagatggtacgtttacgaattgtactaagtttgctattttagatctttctaaaaatacggagttgagaactttttctaatcatgcaggttttacagtaatagatcaaactgttaaataccgaaataaaaaacttgttggggacaaggtggttgagtacggtgacgaacaaacacagaatattgcgaaaccctattatttgaattgcgtgaatgtggatgattgtccgaatctgacttgggaagttcctgaaacttggtgttgtatcaaaaatttctatgtatggaataaggaagaactggagttgcctgtcagaaatgtgattgtatacaatcgaggttcgaagaatgtagttcgtcacgagtgccctgtatgtaaagtggatggtcaaccaagagtgtattctttcccaaaaactcttgaagagattattgctggtcttaaaaagaatcaggataagtaaactgcatgagaatattaaataagttgttatttattctgcctcttatatgtgtcatcacttcttgtggtgacacagaactggaggctccggaaattattccttcggagccttcagttatctctttttgggaggaacaatcgcatctggtaatgatgggttggaaaggaaaagtaaacgcagtaaaagaattttcttatattgtaccttttgagaggcaaagtaaagatgaagaagctgtatcttcttccgagtggaaatttgatataagtggtcatttaatatattataatcctacgagtattgaaccgacaatatacgcccgagatgtgtggcaagtgatggcttgttattcttatggatatgataaagctggtaaaatggtgaaggtcattgtgaatgatttcagtggtgatcctgtcatttatacgttaacttatggagaacatgaagtctttgttcctctaatctttcctttaggtatttatgatttctttttagtgaaagggctggaaagtatttctgatgcggacggtagtgtcttatatacgtatagtggtaacaaagctatatatactactgagtcttggagtggtgtgacaagtactacttttgaatatgatgagggtgttatgtatcctgttcgaaaaatagtcacattaaaaagaggaggagtaattgccaatatggaaattacatcttatctttataacgaagatggtagcttagcatcatctgataagattgtgaaggaaggagaaaatgaagtagaacgtactgtggtacgctatatggcatctacattgttacctgtttccaaactgactgatgcgggtgggcaattagactggacttataaatatgatgataataactggtggacagaaattacttataaggaacattttgaagaagaggccgaagcaaaggagttgagtatttatactcggaaggacgctttcggtaattggacagaagctgtacagcaacaaaataatatggtagattggtcacatcctgattcttcagttaaagtaaaccgtatcattagttattattgagtacacttttctgaggtgataatgatagaaattttgcctgccacgttctgttggtgggcattttcttttaatctgatacaaatagtccggtctttatctttatcggcataacgaataagttggatttctcctttttgattcggttttaaaatattgggaaccattgtagcggatacgtagggtatttgggattctattattgtataaaggggagagttaccactgttgacaaccataatattttgttgctgtacattacttctcatttgttttaatttaatgccggtggttcgtaattgtaagtctcccataacatatggataggatttatcttttcgaactactccaggtgtcactgtgccttttacaaataagcgtgttttttcagtttgatcagaaaaactgacgagaatggctcggttgaagatccccggtcggccctgcggattataagtaattttaatttccccactttctcccggtttgatggctttctttgtatattgtggaacagcacagccacatgtactttgcacgtgtgctatggctatcgcttttgcctgatgattggtaaatttgaatgtacaagttttgggtttgctatcttcagagaaagtacctagatcattaattaatttattaaattcaattttgttttgtgctttgggttggataggtaaaatatgaaataggcctattataatatatataattgcagtatgtttgactttcatgtttattcttttattatagtacagcaaaagtaatgtttttcattagatttttctcatattttatttgtttattccaaataactctttatctttgcattggatttataattgtaatgaatacaagtttggaaagaaagggataaatgatgaaaccatacgaacgattattagaccataatataaagccttcgatgcaacgtattgcaattatgcaatatttgatggagcatcctattcatccgtcagctgatgatatttatacagcattatctccttcgatgcctacgctttcaaagactacagtttacaataccttgaaactgttttcggagcaaggagcggctcagatgcttacaattgatgagaaaaatactaattttgatgcagatacttccattcattcccattttctttgtaaacgttgcggacacatttatgacctgcaatgtccggaagcggtgaaaaaagtagagagtctggaaatggacggacatcaggtgtcggaagtgcattattattataaaggtatatgtaagaattgcttgagaaaagataaagaaacacgtattgactaattaatttaaaattgagaagaaaatgaaaaaatttagatgtactgtttgcggttacgtttatgaaggtgacgcagctcctgagaaatgtcctttgtgtaaagctcctgccagcaagtttgtagaagttgttgaagtagaaggtggcgcattgacttttgctgatgagcacgttatcggtgttgcaaaaggttgcgacgaagaaatgattaaggacctgaacaatcacttcatgggcgaatgtactgaggttggtatgtatttggctatgagtcgtcaggcagaccgcgaaggttatcctgaagtagctgaagctttcaaacgttacgcttgggaagaagctgaacatgccgctaaatttgctgaattgctgggtgactgtgtttgggataccaaaacaaacctgcagaaacgtaaagatgctgaacaaggtgcatgcgaagacaaaaaacgtatcgcaactcgtgcaaaagctttaaatttggatgctatccatgacactgtacatgaaatgtgcaaggacgaagctcgtcacggtaaaggttttgaaggtctgtataaccgttatttcggcgataaataatcaaacctcataataactcttaaaaggtctgtattcaaaaatgaatgcagaccttttttgtctatatttgttcatcaacttttaaatatcacaattatgagaaaagtacaactgttgttagcttgtttagtattctcggtagctgcatttgctgctgataaagtaattaagttaccaaaacctaatttgaaccgtactggtacggtgatgaaagcattgtccgaacgtcattctactcgtgaatttgcttcgaaagcattgaatttatctgatttgtcggatttgttgtgggctgctaacggtattaatcggagcgattctggaaaacggactgctccgtcggctttgaataagcaggatgtggatgtatatgtggtattgccggaaggtagctatttatatgatgcaaaaaatcatcagttgaatctgatagctgaaggcgattatcgtggagcagtggcaggtggacaggcatttgtaatatcagctccggtatctttagttttggttagtgatctttctcgttttggagatactaagaatgcacatactcagttgatgggagctatggatgcaggaatcgtttcccagaatatttcaatcttttgttccgctgcaaggttggctactgtacctcgcgcttcgatagatatcaatcaattgaagaaggtgttgaaattgaaggaaagccaggtaccaatgatgaatcatcctataggatatctaaaataaaaaactggacaggattctaaaactatttcggagtaattgaagtgtaccccaattgtttttgataaacttttggggtacatttctttttcaggtcgtctcttttaattagtaggagtttttagctcaatacccgaagactgttaattcacgaattgctgcggggggacacgcatttccatggccttcaggaatgactagtttcaaataacgagctgtggtcgatttgacatagtatcgaaatgtttctctaataaattcatcattgaagtcagaagcaccgattttttcccaattactattattgttgctggcataaaattccacccatttgatattattagctctactagcttctccacggtttactaaatcaatttgagcaattgtgatcgggtctttcatatcaatggtaatttcataaggaggttcgcaccaattggcttcagacttagttttacagtgccagaaagtcgtttcatcgtcgtcaattaggtttttcaccggattggctgctgcttcggaattgcaagcaataatttcccattttgacttatctattttcttcccttctttaacgatacggaataaagtgctactttccttatctataactaatgaattattcggagtgccgttctgtgtcgcttcaatgcttccaatagttatgggcaatatatagttacccggaagtagattatctttgagttggtaggaggctgttgtttcattaactccttccggtaaagaaattttatccggagctgtgtacgattcactgggtagtaaggtgaaattaaccttattgtttgaattatactgttcaatcagagattgatcgtgggttaaatcgcattctatatcccatttattagtaaaaggtacgctgatgtggacgtccatttgggaggtttgtaacggatctatattgaatattcctgagtttgtgatttgtacaataggttctgatacctgaaatgccaacaatgaaacacatctttcggggttgatatttagttcgttagaaaccaacctcagtggaagaacatattgaatctggtcataatcggacaattcgactattttttcaggatgataggttatataaccgcacatttcatttttatttagtaaaaattcaatgttggacaattcataacagttttccggtaacatttgataattggttctgtcttctctgttcagagagtctagtaaattgggatctatcatgaattttacttttcctgacatatcgcttaatccgcctcgttgtacccaaagctctgcttgataactttctcctacattgaatgatttttgtatattcagtgtattgatagcaacagatactaggctatctgctttatctgcgatctcaaagttctcgttacaacttgctgtcagtatcaaaaatactatggttaccagtatggagtatatttttttcatctttttttattttaagtcatgaaacataatgttgatttaccatcccggattttgaacaagcagttcagttttcttcatttcatcgtctgggataggatataagtacattttacgtctgaagacaatcgggctagcttctacttcttcgtagaatttgtcttctgccgcattcatattcatgccatgaacatatccgaattgacgcccttctccatcctggtctgctatcatccaacggcgaacatcgaaataacgttgtccttccgttgccaattcgatgcgtctttcacgttgaattgcgagtctttgcaactcttgatttccctcaatggcagggttgagttcttcaatattcgacaaaccggcacgctggcgtactttgtttaaataggtcagaacacgttcgtcctgaggatcaatttcattaacagcttctgcatacaataaataaagatctgcaagacggaagatgatagaagggcggaacttgttttgaacccccggagatttcatgctaacttccctgttaaatcttttgtatagcatataaccagtatgagtataaattgtgccgcttaattcattggggcttcctttgtggaattgagttacgttgtttgttacatgccatctcctattttggaaaaatactgtattatagaaacgtgcttcccgattgaggaaccgattgctgacattgttggccacttgtacttctttgcttccggctttaacagtctcagtgtatttgtcaaacccttcggttgtatataatgtggattgtggtaaataacttgttgcttgtaccgggagaccgtccttcatataaaagtcgtctacgagttcttgtgtgacaccaatgcaacccattccgttttgttcacttcttggggtacatctacggtcgaacatgtcatttgtcattccaccccatgaagttgctgcagtagcccatataatttctttattatatgtttggaaaagatcgtatatatcttgtgaaggattacccgtattcagcaattcataattaccttcctcatctgcaaattttatgaattcttctaaagcagctaccgctttattccatttattaggatctttatcaggaaaaagtcttgtcccatccaaattagttacggctagcgcttctttgtattcgccattgaataacttactggctgcatatacccacattttagcttttacagccagagctacgcctttggttggccatgcattatgctggtcgtcatcatgtaatgccttttgaggcagctctttggctactgctgttagttcttcgtccaaatagctgattacttcatctatggtatttcggggcagatccagattatcttctctttcgagaattaaatcttttaccaaaggaatagcaccatattgttcgaaaagcaaatagtgataataggctctcatgaatcttacattagccttcatctctgttagttcttcttccgtcagtacatcaacatgggttccatttgccgctattggtttggcgtgggtcaagaatatatttgcttgtctgatttctttatagcatgtaccccaacggtgaaaactcatgttagctgcatttttatctgttttgttatagagttttgcatctccatatccaacagttaattcatcacacatacctgcccaaggatttttaaatcctgtgatacttccagcagctgcggtaattcctgaataatctggaatagaagtaaatatgtttgcataccatcttcgggtataagatacattatcgaaaatttcatccaatgaacggagatttccggctaactcatcagatacattcagataatcgcaagaataaatattgcacaatgcaaaagcagctatcagtattttcttatatagtttcttcattgttttcatattttatagatttaattaaaatgtaaagtctattcctaaggtaaaggtacgattcttagggtatacgtttcctccatttgcatttcctgcttccggatcgaaatacttaaggtcatcccacaaagcaagattatatcccattacataaattctggcagcctgaacattaaatttcttcaagaattgtttgggcagttgataaccgaattccatgttttttaatcgtaagaaacctccattacgaagccaccatgtgcttgccacttgattattggcgttgttggcattatctttatgtaggcgtggcattaatacattttgacttggattactctcagtccaacggtccaatgcgaaagtacgataactggattggtctactccccatgcaaatggataccaaccttccggagtatttcctcctaataaaacagaacagtttccggtaccttggaagaatacactagcataaaatcctttatattcgatgtttaatccaaatccgtaaacgatctcaggtacattaggatgtcccacgcctactactttatcataggaatcgataactccgtcaccattcacatctttgtatttaatatcaccggggccaagcaatccacctagagtgctttgaggcagttccgggcgtaatgtatagctttcaataccattactgttcttattgatgatgaaatcttcttttgtgtataagcgttcggctatatagaggttattttcattaattcgtttacctgttcgttccatccatggatatttttgtggtaattcatcatattcttttatctcatttctggcaaatgtaaatgtccctcttgcacttagttttactttaccaatttgatgatgagcattcaaagacatatctacaccatggttggatacgattccatagttagcatattggttgacacgaaaaccacttaatgttggtgtcgtttttctttgcatcaggatattgcttctttcggaacggaaatagtcgaatacaatatctatcttgttgttgaaaagtcctaagtcgaaaccatagttttgttttttctcaatttcccaaccaatatctaacgtttccggaaatccttcgatgataccttgtcctatagaattagtacctccgttactacctattccttgtgaccatgaacctgcattcatagagaaagtaggacggtagataaaacggtcactggtagtgtcgttaccagttttaccgacagaagctcttaatttgattttgtttatatagttttttaaaactccggggtaaaaaggctcatttgacaaataataagccagtcctacagccgggaaaaaaccgaaacgatgattcttggcaaatgcttctgaacccgtatatccaaaatttccttcaaggaaataacgtccgtcataagagtaactaaaacgccctactagcccttgcttgcgataggggagaggttgagtcttgagttgtgtttctttttgcatatatagcaacataccacttacatcatgcttctctgcaaaaatacgtttgtagttgatagctgcatcaatatatattttcttttgcgcttcaataccattgtccttcaaatcgctcaaatccggtgttcctgatacaacttggatgaatgttaagttaccgttctcatctctacctgttgcatgataacgggaaggattgtatgaacgtatggatttgaatgttgcatcaaagtcatagctgacatttactttggcgctaagtcccttggtgatgaaatcgagtttttgtctaacgccaactttggattgaatacctgttctccattggcgggtataaccggaattcatcaactgattgtatgggttcctcatatttacacctcgttcttgttcgtaagtagctactgttccgtcactatatactgcgggaaaacaataaggaggagtaatcaacatagagcggaagatagtagatgaagattcacccggataattgcctatcaagtattgtcctgccaagtcaatagatactagtgttgtagaggtgacatccatatcaatgtttgaacgcagattaaaacggtccaagccaatattggtatcgtatttttctgtaggattacctttatatataccactttctgtataataggcaccagatacgaaatatctggaacgtgccgaaccgccacgcacattcaatgtataccggtgattatgtgtattctttctaagcagttcacctatccagtctgtatccggataaagatcacggtctgtactagtacgaaacttttctattaattcagcgctgaataaatcgggttccccgtcattatttaatgcttcattatataaacttaaataatcagcagaacctacaaattcaggcagacgttgtggacttgaaatggagtgttctgttttaaatgtaattttaggtttttcgtccttaccgcgtttggttgtaactaatataacgccatttgctccttcagcaccataaatagcagttgcggcagcatcttttaatactgagaatgtttcaatctcatccggttcaatatcggtgattttacgaggaacaccatctactaagactaaaggggttgatgcggaactgttagatgcgaatgtgctgataccgcgaatccagaattctgcatcatcgtatcctggttcaccggaacgttgtacggcaattaaaccggatacttgtcctgccagattgttggtcaaatttcgagtcggggcagcgatttccgaaggctttaccgaactcatggataccacgacactctcttttttttgttgtccataaccgatgacaactacttcgtccaatgctttggtgtcttcgcgtaaccggatgttaatgttgcgccgtccgttaatcttgatttcttctgttgcgtagcccaggaaagaaactataagaatatcatttttgttagggacactaatggaatatcgtccatccatatctgagattcctcctaatgttgttccttttacttttactgaaacgccaatcatggactctccttgtgcatcggttattacaccggtgactataaatttgttactttgttgttggctgtttggttgttcgcctttatggtaaattgtgatttgtcggtcgttgatgctgtaagtattatctgtaccgagaaatagctggtccaaaatagcgctcacttgctgattttttacatcaatatttaccttacgattcgtatcgatgatttggtccatgtagaaaattatgtattcactatttttttcaatttcttgaaagacttgtttcacagtcttttgagaggtcttcattgtgaataatttgctttgcgaatacgaatttgttgccaagcaatgacctattcctatcagtagaaaaaatgaaaagaacttcataattagcaataattgtttttcttcagtcttttttagactgaataattggtgtttttccatacttttataacgaattagattattaatatttaaacgtgtaagtaatttaatttaaggtcgggtgatatgcgggtattatccggccttatcattttctaggaagtcatattttcataggctattaatttatttagatttgacattaatatagattttctcatttgattctgttatttgagccgggacggtttgaatcagcgtatgcaacacatcatctagttcttctttcagatctagcttgccactacaagtaatattagcaagctgtttgtcggtaatgattgtcttaccatagtacttgctgagtttttttgtaataatttccaacctctcttttttgaattggtaaaatccatctttccaagctatgtattcttgtacatctacaggatgtacgctgataccttgctgatcattatatgcaagtaaattgtttggtgataaagttttcgtttcgttattgttagtctttacttctacttttccagtgacaagtactactgtttgtatattctctttttcgtatgcacaaacgttaaaagtagtacctaatacctgtatgtccattttattcgtttttacaataaatggtcgacttttgtcgtgataaacatctaggaaggcttcaccttctacataaatctcccgtttgttcttcataaattcaaccggataaacaactcgtgaactggcgcttagccaaatacgtgtcccgtcagaaaaagtaattgacgagcgttttccggccggcactattaattgattataagtatcttttttcttatcgttttcagtttcctgattaatggtttgagaattgacatttaattttccctgttggttgtaatgtagcttactttctttaccttgtatagctatctgtttcttttcggatagaatcaaaagggtttgattggtagagacatcaggtttctttactgcgactatatcagatttttccatgcactcgcttgtctgataaatattttgcagataccaaccacttacaaggaagacaacaatgcaagctgcagctaaagtgcggtatagaatgcgtctctttcttttgttctgtatttccaaacgattctgatcggatatacatttccaaatggaatctactttttgttgaggcagatagggtttaggaacatgacggagaatatgtagaaaattacgcgcaatagctatttccttagctaactgcttgttttcttgagctaatttatcccaaaacataatactttccggagtcggatgttgttccgattctaaaaaataagcatcattgagtaatgagtctgctttataattattatagtctatttttgaatccattttatgcgttgtttatataaggacaactcaaaaaatggaatctactcactgaacttatattttttttaaagaaaatgcattttttgtgtttctctgaagaaagtggtcaagatacttatccatgcgatgcattcaggtgttccgaaagtatctcttactttttgtagtgagcgttgaagtaaattgtaggctgattgataattaatgtccataatctgacatatttcatcatattccatttcttctataaaacgataatatatgatttctcgttgtctgggagttagcacatggagtatttttttgatttcattaatttgttcgcgacgttcttcttcattgataaaatcattctctgttatatattgttcttccatagagtagaagttgaaggcataggattcttctgaacgctctttactgaaaacattatagatactgtttttaagagaaatcatcagatagatttttacattttggggtatacttaatttatttttattcttgtatattcttataaatacatcttgtatacagtcttttatcacttctgtgtcaggagtgatttgtaatccatattgatacagtaattgaatatggtgtgtataaagccaactataagcttcatcattgccttcgagaaaaagtttccatttaatataactttcgtcttgaatttgcatagatgttaatttttaaattccggtatctaccggacttttatcaggaaataacgggctataaagaattgtctgttttaatacctgtaacttaccgtctttcacaaacttttcaccacgttcggaaagatgatcaatcatagcttgacgaagctcatttaattgctgtttgtattttttatctgttactacattctttagttcatgagggtctttcgagagatcaaacaactcttctgtcccggtgtgaaaacgccagatatattttatttttccgtcggttaatgcacaccaataattgtcaggactatagcaagtcgcatgttctaaatctatgtatttcctccattgatcggttttaccttccattaaccggagtaaagattgaccgtccatatcttgcgggatagaacttccggctatttcaaggaaagttggtaataaatcacgcaattctaccggttgggtaattttgtttcctttagtaaagtgatagctagccggccatttaacgatataaggaacatgtaccgaaccttggtaaggatacgttttacgccaatgataatggtctcctaacatatcaccgtgatcagaaatgtagcagataagtgcatcgtcatatatacctttttctttcaaagttttaattactttacctatctcttcgtcaataaatgtcacattagcataatagtgccttcgtgagtcttttgcatattcgtcaccgaaattaccataaggagcatcttttttcactttttgaggatcctttagtttggcatacggcttatctttacaccattctcctatccaaggtgcaggtatatcccggttcgcgtattcgtccaataaacgttggggaggatcataaggactatgtggacgggcaaaggatattttcaagaacaatggttggttattgataccttcgtaattgcgaatcatttcgcaagccatttctcctgtccatgctgtgggatgcaatcgttccggaagtttataagtagctgctccatggtcattccaaccgatatgagtagaatccgggtttaagccgggagcttgcatttggaaccataatcgatagtcactgataaaatcgggactttctacgcgtccgctttcatcaactaatgttccccggaatccatgcagagccttttgaggataccagtgcattttaccaatgccaaagctgtagtagtttaagtctcccaacatacgaggcatctcataacggtattggctggctaccctgccgtatcctagcataccatgatgccagggagaaagtccggtcaataatccggaacgtgccggtgtactactaggggtagaagaataaccgtttgtaaagagtgtaccgtcttctgccaaagcgtccatattcggagaaatgacagaagtatttcccatacaattcatggcatctccacgatgttggtcggatacaattaaaatgatatgaggacgtgttgaagtttgggcaaaaagaagttgcggaaggatataaactcccgtagtcgcaagtaatgagctttttaataaaaaggatgttttcatattctaaaggatatcgtgtttcccatttgacaaaagtacaatttctttttgaataaaagaaaaatagccgtatttttacacttcttaagaatctcttgactagttataaaaaagagtgacgctatcacatacggataacgtcactctttgcttcttatggcgtcataatcctgaccggatatcgacactcttttttctacttcaataaaaactcatcaattgctttcttgtaagttgctttgtctgcagctccgcggaaaagctggggatctcctttcatggggatgaatacgaacaacggaatacttgttgcattgaacagggcagccagttctttctgcttatctacatttactttgtagattacaattttcccggcatattcttttgccaattctttcataataggagctgtttggcggcaaggtccacaccagtcggcatataaatcgataatggcaggcttgtcgcctttgtatttccactcttttgacttttcataatcgaagacgtctttcagaaacatttctttattcattacgacgacttctccgttgttacctgttacttcttttttaccttgtttggcttcagctctgtcattgaacgcgtatacgattacgcttaccatgacgagtgctaccatgactaatactttcttcattcgttatttatctttttatgtataatgccgttctattaccccttgtaattcactgctatgaattacaccggaatgtctccataccgcttctccatttttgaacaggataaaggttggtacagcttgtatacgatattttgtagccaagtcttcatgttggtcaacgtctatcttgacaatacgggccttatcacctacaactaatttgagctcttccagaacgggtttcatagctttacatggtccgcaccattctgcaaagaaatcaactaaaacgggcatcggtgattgtattaaatcttcaaatttctccataatctttcctttcttaaaattaaatgacagtcattgaagactgcaaatatagattctattttattaatataacgggaaaatgctgtttttgttcatcgaatagtaaccggagagtcattctgttgtaatctgaaaacgggagttttgcatatcgaaaagtaacgggagttaaagttatgaactaaataataatcgctatatgaaattcttatttattgttcaaggtgaggggagaggacatctgacacaggctatcaccctcgaagatatgttgcagcgtaatgggcatgaggttgtagaagtattagtcggtaaaagttcctcacgcacattaccaggttttttcaatcggagtattcatgcaccggtgaagcgttttatcagtccgaattttctgcctacgacagataataagcgagtgaatctaaagaaaagtttagcttataatttattgaaactaccggaatatttccgtagtatgtactatataaatcaacggattaaggagacaggggcggaagtcgtcatcaacttctacgaacttctgaccggacttacctatgcgttcttccgtccctctgttccgtatatttgtatgggacatcaatatttgtttctacatcgtgattttcagtttccggataagagtccggtccagttatggatgttgcgtttctttacacgaatgacggctcttagatcatcaaagaagttagctctatctttcagggaaatggaacgggatgatgaacatcagattgttgtggtacctcctttgattcgccgggaaataacggcaatccagccggaagaaggaaattatattcatggatatatggtaaatgccggttttgcagatacagtggagagttttcacacaatgcatccggaagttcctttaagatttttctgggataagacggagacagaggaagtagtacgggtggacgaaacattgagttatcatcagattgatgatgtgaagtttcttaatggaatggcgaactgcagggcttatgccagtacggctggtttcgagtctatttgtgaagcgatgtatcttggcaaaccggtattaatggttccggcgcatatcgaacaggattgtaatgcttatgatgctatgatagcaggggcaggaattatcggtgattcgtttgaactggagtccttgcttcgttttgcgggaaaatatattccaaatcgtgatttcatttattgggcacgcagttgcgagcgtcggattattcttgaattggaaaaactggctgcttcacaatcagaaataacttcaataccaacatatactaattatttaccaatatgaaactgaataaaacagattatgtacttgaacgtgcatcagacggtggctattatgcttggctgactgtaaatatgcaatgtaatgcttatggagagtctcctgatgaggctattcggaacctggaagaatcaatgaatgagataattgatgaaatgtatatggtggaagactttgtctaatgaataatgtgaaatgaaaaacggataatgaaacagaacccggtttcattatccgttttcaataaatgatttttctattgttcacagatagtcagttcatcaatgatatgggatgctcccgcaaatttatctatgataaacagagtataacgaatatcaacgcaggcagcgcgctgtgatgaaggtcggaaagcgatatcacctgtcagtccttcaaagttacggtcaaaagcagttcctatcaactggcctttactgttgaaaaccggactaccggagttacctcctgtgttgtcggtgtttacaataaagcagaccggcatctcaccgtttttgccgtactgtccatagtctttagagttatacaactctttcaacttttgcggtactacaaattcccagttacccggatcctctttttccataactcctttgagagtggtatgagcatcatacactacaccgtctgcaggttcataaggaagcacttgtccgtaagtcagtcgtaaggttgagttcgcgtccggataaataggtattcccttttcttgtctcatattcatcatgccttttacccatactttatgagcggcatcataattctcattggcttctttcatggcaatggcagttttcagaatgccgttggtaattgaatatttgaataggatcatccagtcatatccgattttatataaactaggctttttgatgaacttctcaaaattcttttgattaccgaaaattgagttatcaaagcacgcatctacaaatgcatctatgttgcctttgaagcgggagtcaatgatttcgaatatattgattctttgttctgccggaatatagttagcataagttttgagcatttctttagctaccattcgttctacttccgggaaaggaacagaagcaaaatatttttcaccttcctgtttcaagttttgggcagcttcttttattttctctttatcttttgattttagtgcggtggccagtgctgttgtagaggggatgcgcataaagtcgagcgctgtgacaagtgcttcgttgatagcctgttggtgatataatgcgtcacgtcggtgagctacaatagagcgaatctcgtcaaaagctttctgataagagttatctcctttttcacggccgcgggccaatagttcttcttgctgcgcacgtttggtatccaatactttaagacgcatcagcccttcgttcatgccaatagcattcttccaatagttggctgatgatgcatatttgctggcgtaatgaatacgcacagcaggatctttaagcatttgttccataagaactttctgacgggcaccacgtacgtgctgacgcataaagttagttgtctgcatccgttcttctacttcgtcggaaatcatgtaccgccagttacgtccgggaaatcccatgacaaaagtgaaatcaccttcctgtactccggcaaggctaatggtcaagtgtttctttacgtgcaaaggaacattgtctttggaatactctgccggttttccgttcttatccgcatagatacggaaaagggaaaagtcgccggtgtgacgcggccacatccagttgtcagtatccgctccaaattttccaatagaagaaggaggggcacctaccatgcgaatgtcgctatacacggtttttacaaacagataatatttatttcctccataaaaggctttgagttccaacttggtagcaggagttatttcaatgttttctgcttttgcaaaacgttctgctactttgttgaggtaagtcggagacagataattagttccttccgggtctttgtctttctttagttgttcgttgacgtagtcggttacatcaagaatacggtcgataaaagtaaccttgagtcctggtgtaggaagttctgcgtcgcggttcattgcccaaaaaccttctgtcagatagtcatgctctacattactgtgttgctggatagctccataaccgcaatgatgattagtcagcaccagcccttcggaagagattacttctcccgtacatcctcctccgaagtgtacgacagcgtctttcagagaaagcccgttcgcattgtatacttcttcaatgggaatctcaagacctagttctcgcatggcaatctcattctgagttttcagatcaggtagcatccacataccttcgtcggcgtggatgctaagagttgccagagaaaaaatagcaaataggatttgttttctcatttattctacgattgtcatttcattaatcaggtgtccgcagtttcctagtttttcaaggatgaacaatacataacggatatccaggttgatacaacgttgcaggttattgtcaaagttgatatcgccactcaatgattcccagttgccgtcaaaggcacaaccgatcagttccccattctcattcaatactgggcttccggagttacctccggtaatatcgtttgtagataggaagcagacaggcatatcaccgttgggtaatgcatagcgaccataatctttcttctcgatcaactctttcagtttggcgggtactacaaattcgcggtcttccggattttctttttcaagaatacctttagttgtcgtatagtagttgtagtgtactccgtctttcggatcgtaaggtttcacgttaccgtatgtcagacgaatggtaaagttggcatccggataagaaggaactggctgtttcatttcgccaagaccacggatataggtcttgtgaagtaaagtcaactctttatccatatcttctaattgagaaacaattttctcaaattggtcatatttagactgacagtattgcaaagccaaatcattatcgatagcctttacagacggtttcttgacaaacttctcaaagttctcacggttagagaaaatagagttgtcatacatatcatcgacaaacttgtcatagttacctttatatttctgctcaatgactttgtagatagacagacgctggtctgccggaatcatttctgcataaaggggaaataaaactttagctactttacggtctacctcatggtcatagtccttattgtgaatactttcatacgtatctttcagcgcttcgatacgtacttttatcagagaatcattcttctctatcaatgcttcacgtgtcttagccagcatgacacttccaaattcgattgctccgaagaacgtttctctcagacaggtgaactgatagttgagaggtgctgtcttagctaccagatcatctatttttttcactaccgttgcataatcagcattattcttttcctttgcaaattctgcaaatttagcttcttgcgcagctttcgtacccaatacatcgttgtcgatgattgccttgttcattccgatagaatttttccagtagttactggaaccggcatatttgtttgcatactggatgcggattttatcacttgcattcatcacttccttcaatacagccagacgggcaccgcggatacggatacgcgggtcgttttccgattccatgcgttcttttacttccgatacggtcagataacggcttgtacttccggggaatcccataatcattgcataatctccttctttcaaacctttgagcgagatagacaaatgtttttttgttttcaaaggagtattgtttgcgctgtattctgccggttctccgttagcatccgcataaatacggaacatggagaaatcaccggtgtgacggggccacatccagttatccgtttcgccaccgaacttaccgatagaggaggggggagcggcaaccatacgtacatccggatatattttcttataaaatagatagaatttgtttccggcataaaatggaagtgcttgtggaacgattccttttttatctttcagatcgcttttattgtaaagctcgttggccagtttctgaagaaaagcactactgaaagattcagattcggtaatttctttagcggcaatctttgcattgacaatatccgtgatatcttcgatacgttcgataaatgtgaacttcaatcccggagtcggaagctccttgtctctggatgtagcccagaaaccgtctgtcaggtagtcatgttctacgctactgtgctgctggatggaagcataaccacagtgatgatttgtcagaattaaaccttcaggtgagataatttcccccgtacatcctcctccgaagataccgactgcatctttcaaagagacgccgttcgggttatataagtcctgggcttccagtttcaatccttgttttttcatcatatctatggaatgttgctgttgcattaattgcaataaccacataccttcatccgctttagcggagcacacgatgagcgctgtcagcgctaataaataaagtcttagtctgttcattttttaatgataaaatttgaatatatgattgttagtcttcaatttccaattctccgtttttcaatgcttccataatattggcgggcggacgttggttcatcagttcgtttttcatgtagtccatgtagagagctacatgttggaagaactgatagtatcctttacataagtaattcaacccgggttcgccgtcggctgtctggctgaaacggttcttgggacattctccgttgcaggcaaaaaggaaatcacattctttacattgggtgggtagagattgatatttcatgtttccgaacttgtgttgacgttcgctatgcatcatttctacaagtgtctggctgtatatgtttcccagtttatattcagggaatacaaagtggtcgcaagaataaacatccccgttgaattccataacaccagcgtgtccgcaggtcttcgccattgtacaaatgccaggttgttcacctacccagtttgctaaggtggagtcgaatatctgtatgtagtatttgcctacatcttctttcacccattcgtcgaaaagggtacagagaaatttaccccattgttcgggggtgatagagaaatctgccagttcacctttttggttttctgcaagagaagcgaggtggcggccgtcctgatgttcaaggatacgttcaacgataggtgcaaattggatatatttgcagtctatctccttgaagaaatgataaaaatccagtggatagtcagcattgaagtcattaataaccgccattgcattccattctacaccatgttttttcagaagattaatcccttgcatcactttgacgaaggagggcttccccattttatttttacgatattcatcgtgaaattcttgaggtccatcaatcgaaacgcctaccagccagttattttctcggaagaactcgcaccattcatcggtcagcatggttccgttggtttggatgcagttatcgatcgttcgtccgcgggcgtatttcttttgcagttccatagcctttttgtagaaggagagcgggcgcataagtgtttctcctccgtgccaggtgaaaagtacctgtggcatggtctgagagttgatgtactcgtcgatgaatttttccaaaagttcatcgctcattacgtgtttcgggttgtctttgtatagattcgctttttccagatagtagcaataatcgcatgcaaggttacatacggcacctactggctttaccataacgtaaagcggtttggcaaaaggagcataagttgatgttttcatagctgcaaaattagataaactaaatgaaaaaaagcgccttatacctatgtttataaggattattaaagaaaagactcttacaagttttaaatattgataaaatgtttctttgaagtccgaatcagttgtacctttgtacccggaatttaatgaatggacgaacgtgaataaaattttgccttttttacttctgcttccgtttctggcttcgtgtactagtaagtataggatagaaggaacatcttcagtaaacagtctggatggaaaaatgctgtatctaaagaccatgcgtgacggggaatgggtgaagctggactctgctgaggtagtgcatggactgttctctatgaaaggaaaagtagactccgtacaaatggtgacgctttatatggatgatgagagtatcatgccgattgtattggaaagcggtaagattaaagttaccattagcaatacggatttaaaagcagcaggaacttccttgaatgcagcactgtatgacttcattgacaaaagaaatgcattggaagaaagtattggggagctggaacaaaaggaaactcgtatggtaatggaagggaatgatttggaagaaattcatgcacagctgatggtggaaggtgattcgctgatgacggcaatgaaccagtatgtgaagacgttcatttcagataattatgagaatgtgttgggacctagcgtatttatgatgctttgtagttctttgccatatcctattatgacacctcagattgatgatatcatcaaagatgctccttattcttttaagagtaataaacttgtgagagagtttttgtctaaagcaaaagaaaatatgaagttgatagaagaacatcaacggttggagcaaaatacatcaacgaataaataagtcaggagatttttttgtatatttgtgcaaaagctccagataaaatgaaaacgactgttagtgtattcgccgctttcttttttatttctgtgttatcggtttcttgtcagggagatccgggtgattttaatacgactttttctgaaatagaaaagtggatgaatacgtagcccgcgatacagccttgtatcatggtagagtaatgctagagtctgcccacatataatacatatattatcggtcttggtcttcgtttttcaccattcctttatatttctccggaagtgcactctctacggcagtataggcttcggccatagtagctttgatattctccattccttttcctttgggaggaataggatcgtgaattgtcaggatcatgcgatggcggtgtatccattttccggtacgtggcaggatttcaaacgaaccgtcgatggtgacaggtacaacagctagttgtaagtcatccgctaactgaaaagctcccttcttgaaatatcccatgtgtcctgtgaaagtacgtgctccttcggggaaaacaaccagagaaacaccgtctttcaacgaggctttagcctgttgaatggtctccaacacttttttcggtcccgaatggtctacgaagatatgtcccgcgctttcacaggcttttcctacaaacggtagtttacgcagactttttttcatcatccacttgaagtttcttccgatgaaaccgtaaataaggaatatatcgaatgaaccctgatgattaggtacgaaaatataggatgtcttgccgtgtaacttttcacgtccacgaatctttacaggaattaatagaaaaagacaaattaattgtgaccatatttttcctggataatatccccaaaagtgagctcctcccacgagagaacctacgatagtgacgattgccgtgaggatagtcaataccaataaaataggcaaagcaatacaaatttgataaatataatacagtatcttcatagggttggatttttatcctgcaaatatacatgattatttggtaaaaaagagaggtggatacgatataatctttttgattgtactatttttgtatcttattatatgagatagttacaaaaatatgatacgtatattacatactgccgactggcatttggggcaaactttcttcgggtatgaccgtgccggtgaacatgaagtctttttgaactggctggccggagaaattcgtgaaagggagattgatgcactgattatagccggagacgtttttgatgtttccaatccttctgctgcgtctcaaagcctgtattatcattttatttatcgagtgacggcggagaatcccactcttcagattgtgattgttgccggcaatcatgactctgcggcgcggttggaagctcctttacccttgctgcaagcgatgcggacggaggttcggggggtagtacgcaagtcggacgatggggaaattgattacgatcatttgacggttgagttaaagaaccgtgacggggaggtggaattgctttgtatggcagttccttttttgcggcagggagattatccgacagtcccgacagaaggtaatccgtatgcggagggagtccgggagctttatacgcagcttttgcaaaggctatggaagcgacggaaagagaatcaatctatacttgctatcggccatttacaggctatcggttcggagattgcggagaaagattatagcgaacgtacagtgattggtggtttggaatgtgtgtcacctgatgcattttccgaacaaattgcttatacggctcttggtcatattcataaggcgcaacgcatatccggcagggagaatgtgagatatgccggaagtcccattccgatgtcttttgtagagaagcattatcatcacggggtcgtggaagtgactttcgatggagggtgtgcggtagatataatgcgggtggaatgcccgaggttaatacctttgatgagcgtgccgaatggagaacctgcgtctccggaaattgtgttggaaatcttgaaagagttgccggtaacggaaggagcagcaccttatctggaggtaaaagtgttgttggacgaaccggagccaatgctccggcaggaagttgaggaagcattggctgataaaaattatcggttggcgcgtattgtctctacttatcgtaatgaaacgggaaatgcagagaaggaaaatgagaattggaaaagaggattacaggaaatgtctccgttgcagatcgctcaatctgcatttgaaaagatttatcaggtggaaatgcctgaggagttgacggacttgtttcaggaagcctacctggctgctacacgtaaagaggaggaagaagaatgaagatattagcgatacgattgaaaaatcttacttcgatagaaggagcggtagaagttgattttgcaatggagccgttgaactcggcaggaatatttgcgatttcaggtgctacgggagctggcaaatctactttattagatgcattgtgtctggcattgtatgataaagcacctcgttttgcaaattcggtagaaagtataaatttggcggatgtaggagataatcagattaatcagtcggatgtaaggaatctgcttcgtcgtggtacgaccgacggatatgcagaggttgatttcttaggagtcgatggtcatagataccgttctcgctggtcggtgagacggacaagaaataaggtgagcggttccttgcaaccacaaacgatggaagtgaaagagctggatacagggaaagagtttcaaggaaccaaaaaggaactgctggctcaactgacagaattggtgggtttgacgtatgagcagtttacccggactgtcttattggctcaaaatgatttttctacattcttgaaatcgaagggagccgcaaaagccgaactgcttgaaaaattgacgggaaccggtgtttattcccgtatttctcaggaagtttttttacgaaacaagttggtacaggaagaagtgactacgattcgaaatagaatgagtgtaatcgacctcttgccggaggaagaacttcttgctttacagaaagaaaaagaattgctgattgcgaaacgtgcagtggggattcaattactggcggaacagaatgcccggttgaacattgtccgttcgttaaagatgcaggaggaactttggaaaaagaagcaacaggaagaacaaggcgaagaggcaaagttgagactcctgcaggaaacactggcttcacaggaagaagggttggtacgtttcaaagcacaatgggaagctatacaaccggatttgaagaaagcccgtcagttggatgtgcagatacagtctcaacaggaaggctataatcagttgcggcagatattggaaacagcttgcgggcaggtggcggagcaggaaaagaagatgcggatggcaacgaaacagttgcagggggcttatcgttcattaaaccgtttgttgacggatacggaaacggagtcgttgccgcttgaacaagtagaggatattctacagcaggaagaagataaactgaaagccgccataaaagccaatgaggaacgactggtccggctaaatgcttttgattatgtatcattagacgaagaacagaagaaactacaaaaagaactggttcgtcaacagaatgtccggcagttgactgagtcgcaggagaaagtgaaaacagaaatagtaagactggagaaagaaacggttgattgttcgatgcagttaacagaacaggaagcgacacgaaaaacgattcagcgtctttatgaaaatgcccgtatggcagtgggaaaagacgtgaaagcattgcgtcaacagttacaggaaggagaagcttgtccggtttgcggcagtacgtcacatccttatcaccaggaacaggaagtagtggatattcttttccgaaatatagagcaggagtataatgcggtggtgattgcctgtcagcaaacaaataatcagcatatagccctgcaacgtgatctggcgcatcaaaaaactgttgccggacagatcaaagaacagttatccatatggcagaaagaagaaattcatgcaggaaacgaagaacagatacagaaccgtttgcaggaattggcaaaacgtattcaggagtatagtagtctctatacggagtggcaacaaaatgatgagacgataaagaagatacgtgtccattgtgaggctttgcgtgaaaatgtttcccaatgtcgtttgactatgcagcaagtttcgtccgctaaagaacagttggcactattacaaaacgctgcttctgccgaacagcaacgctttgaagtagtagagaaagcattggatacacttcgtcaggaacggtcgcaattattaaaaggaaagagtgcggatgaagcggaagccgctgtagccaaaagggaaaaagagctgactcatgctttagacggggctcggttgggagtagaaactttgcacaaccgtcttttaggcttacaaggggaaatgaaacagattgccgcaactgtcggggaattgcaggagcaacagaaaaagattgaatctcccgaacaacttcccgaaataataaagcaacagcaggaagacaatctaaatacggaacgtagcctttctgctatcgaagtccgcctgttgcaacaggcaaaaaataaagtaacagccgaactgatagctaaagagctggccgaaaagcaattgattgccgaacgttgggctaaactgaacaagttgatcggtagtgccgacggagcaaagttcaaagttatagcacaaagctatacattgaatttattgttacttcatgccaacaagcatttgtcttatctatccaaacgctataaattgcagcaagtacccggcactttggcgcttcaggtgattgattgtgatatgtgtgatgaaatacggactgtatattctctttccggaggagagtcgtttctgatatctttggcattggcactgggactgtcctcgctgtcgagcaacaacctgaaagtagaatctctttttattgacgagggattcggctctttggatgccgatagcttgcggacagctatggaagcgttggaacaattacagatgcaaggaaggaaaataggagtaatttctcatgtacaggaaatgagtgaacggatctccgtccaggtgcaggtgcataagaaagtcaatggaaagagcgtgcttaccgtcatagggtaagcacagtgatttccggccaggcgccgaaacggaaaggtaatcccacgtagccgattcctacattgacgtaaagcccgcgagtaccttccaaatacatccctccccattccggataaatataaacggaaggggaataattgcccagttgcaactgcatggcgtgggtatgtcctgccaacattaaatctatatccgattccggaagtacttcccgtctccaatgtgtcgggttatggcttaaaagtagcttgaacattccttcaattcctgctttcgcttttggaaggtcgccatgttgcgaaaagggaggttctccttggttttctactccgataagggcgatgctgtcattgccttgaatcagaaatgtatgttcgttgtttaataacttccagcccatagctgcctgcctttgtttaagttcgatcagattattgtcctgatcttgtttgcttttccaatgaaaataaggtccgtaatcatggtttccaagtatggaataaactccgtctccggctttcaggccggctagtatttcctggaaatcattcagctcgacagcccggtgatttaccagatctccggtgaaaacaatcaggtcgggttgctgggcattcactaaatccactaacttccgaatagcaggagtgtttccttgccaactgccgatatgaaggtcggataactgtacaatacgataaccgtcgaaagcctgcgggagtcggggagaggtgtaagtgacttcttttacttcaaaccgggttcgtccgacaaaagagccgtagagaatcataacaatactaagtacggccagtgtcagtccggtgcatataaacggtgtgcgcggccagcgaagccatttatgaaaagggattccgagtacggtaaataagaccagcaatagtttgggagctgtaaacaggaaaaagatgatagagaaccacccgatgtcctgtgtatggcgttccgcaaaagcattgttggcaaagtaaaccaagtaaagaagccctgcggttagcaagaaactgggtacccagtaaagaacgcgtaaccaccattttgcggtgagacgaacaatgaatctcaagtaaagatagaggtccggaagtaccagaaaaagtaggaggaatataaataagcgttgcaacatatgtgtctttagttataatggatatttacattaattcgtttaattcacttaaattctttttgatttcgtggatacggttcaggaatttcttgcgataaatccatagaataagtataagacctcctccccacaacaggatgaagaacagaatcatacctattccgtattgccatatctgccagtagacgaaagaaagaatggcaagtatcaggaggaaagcggtggcaatcagccgttctctgattgtccagtgatgaatgcggttgacacgggcaatcacttccacaagaggcatttcgtctatttgagtccgttgaagaaatcgcgtggtggcgatatcccagcaaagagcgggaatccatgccagaaggataatgatgtagatcgggtttaatctgttgtgcagtatcacttccgtcaaaaataagattaatatcggcagggaaatcaggattagcctgatgttcaggcgggcaatggcatggatacctttgtcggcgtgtcctatcagcctttcaagttcgtcttctttgatgagttctttgtcctttaagtgctcatcgagggcgttccatgattttttcagttcttccagttccatatatcttattcctcctttttcattcttttaagtttgtctttgatacggcttagtttggtagctatgttagtcaccgtcaagccggtaatttccgctatttcctcgtagcttttatcttcgaggtatagcaggatgattgacttgtcgagttgtcccagttggttaatcatctggtatagttgcttcagcatttcattgatagggtcatgtgcttctattgtccggtcaatgtctttggtgaggctgataatttccggtacattcttctctttacgataaaaactgatacaagtgttcagggcgatacggtaaatccatgtcgatattttacattctttcctgaatttaggataagctttccagaggttcagtactacatcctgatagaggtcgttgagcggagcgttgggatgagtatacagatagcatactttgtagattacccgctcatattcgcgtataaccgacaagaactcttgctcaatagggttgtttgcctctgttgttggttctctcatggattttaggattgcttttctggttagttagtcgtgagaaaaggagaaaaatcacacgaagatgcaagctattgcagattggctgccaggaatttgcgcatttcttcaatacttcttctccggcggcgggcatagtcttcgagttggtcttctccgatctttccgacagaaaaatattcggatacaggatgtgcaaacatcaggccgcacaccgatgcatgaggatacattgccccgttttcagtcagtgaaatgccgatctgtttcatgtccagcagttcgtccagcaggaagttgacggactgatccggcaaagaaggataaccgacggcaggacggatgccttgatatttctcgactaataagtccgccatgcctaaattttcgtctttcgcgtatccccacgcttcttttctcacatactcgtgcattttttctgtggctgcttccgcaagtcggtcagaaagggtttgtacgagcaaatgtttgtaaggatcctgttcgtatagtccttccatgtctgcgtcaatggaagaagcgaaagctcccaacgtatccggaatgccggaagaaagcggacggatgaagtcactcaggcaaaggaaaggacttccgtccttcttaggtgtttgctgacggagtaagggaaagaccatgaactgattctctgctttttcaattaccagattatccccgtcggagtttgccttacacaacttgaagattgttctgacctcatagtcccggtcgagtacatccagcatacggtttgcctccttgaacagttgcatggcttccgaagccttgttacgttcctctaccggaaaggaggccagccacatggcacggcaggcatcgcaaccatgaatattggtgatagctgcatagcgaggttggaatccccaggcatggaaaaagtaaatccaattgatgtagggggtaacggtatgtattttataagatagaacagtgctcataagtttgccgatgacgaattatatttatctgaatcttaattcttgtccacgataagtttcgtctatttttccgttatcgtataacaggtgaccgttcacaaatgttttctccactttccagttgaaggtatgaccttccagcggactccattggcatttgcttacaatgcaatccgttgttactgtccatttggagttgggacgtactaatacaaggtctgcctgataacctttatggataaatccgcgattatttatttcatacatttgagcaggcgcatgagacatcttttctactattttctcgatagagaagatacctttatctacaagttccagcatactggccagagagaattggatcattggcattccggacatcgctttcaaagcgcctccctctttttcgcttagcagatgcggagcatgatcggtcgcaatggcatcgatcagaccgctgttgacagcttcctgcaaagccttccggtcttcggctgttttaatggcagggttacatttgatgcgtgcgcctaaagtctgataatcatcttccgtgaaaagtaagtgagaaacacaagcttccgccgtaattcgcttcgttatcaaaggagcgtcggaaaataaatccagttctctggctgtggaaatatgcatgatgtgcaagcgggcatttgcctcacgtgccagttgtactgccagttcggaggaacggtaacaagcttcttccgaacggataaccggatgaagggtcaaaggcacatcgtccccgtatgcttttttatatttgtctgtattttctttgataattccctggtcctcacaatgggcggcgataagtaaatcggttccgccgaatatattgcgcaggctcgccatgcggtctaccagcatattgcctgtgcttgatcccataaatagttttatgccacaaacacggtgtttgtccagttgggcaaactgcgggtagttattgttggttgccccgaagtaacaggaatagttgacggccgacttcccggccaataaagtaagtttctcatccagagcctctaacgttgtcgtctgcggattcgtattcggcatatccatgatagaggtaacgcctccggcggccgcagcacggctttcggtagttatatccgctttatgagtcagtcccgggtcacgaaaatgcacgtgttcgtcaattgcgcccggcaaaagataacatccggttgcgtctatgatttcatcacaaggtgtagttgttttttcttctccggtcagtatttcggcaatcttctcgccttcgataacaaccgaacccagaacttttcttccttcgttgactataacggcattttgaatcagtgtacgtttcatttcttttgggggaatttgtggaaccaactatttacttttaatttaatcactccgaatacggcctctccgaagatactgctgttcattttcgaagtacccaactcgcgattgatgaagataacgggaacttcgataatcttgaaaccacatttataagcggtgaatttcatttcgatctggaaggcatatcccttaaaacgaatgtgttccagatcaatcgtttcgagtacctgtcggcggtaacaaacaaatccggcagtggtatcgtggataggaatacctgtaatgaactgcacgtatttggatgcgaaataagacatcagtactctgcccataggccaattgactacattcactccgctgacgtagcgggagccgacagctacatctcctccagcttccgcacacgcctgatacagacggggcaagtcattcggattatgactgaaatcagcatccatttcaaaaatatattcgtacgaatgttccagtgcccacttgaatccggcgatataggcagtgcccagccctaactttcctttgcgttcaatcataaaaagacgttcgggaaattcttgttgcaaagtcttgacgatgtttgccgttccgtccggcgaaccgtcctctattaccagaatatggaatatcttaggaagtccgaaaacggcacggatgatattttctatgttctcccgttcattataggtagggataattacaatgctatccgatatttgcatataaatactataaattttagaaacaaaagtagttcttttcctttagttacgaacggactaaggataatttaacgtggaagtatatggtaagtttagctttttagtactagtatttagatgtttttgtccttaaggactaagttcttttatgcaagaatctatttgtctgacaatagttgagtttgcgtttgacagttgttgaactttcgtttgacagctgttagacgaaaactcaacagctgtcaaacgaataaaggatagtatattgagaagtaaacgaatggggaaatagaattaaattcaagcggtactgcctttaatttctaacggtaatgtacaaggtgctcgcgttatttttgtacttttgcggggaaatttttataggtatgacgataactgagttgcaacaactatatgctgcccatcctaacatggcagtgatgaagcgtttgttgaaggatacttctgttcaaactattttttgtggaggattatatgcgtctgctgcttcgcttttttcttctatattggtgcaggagggaggttgtccttttgtctttattctgggcgatctggaggaagcggggtatttttatcacgacttgacgcaagtgttggggacagaaactgtacttttctttccttcttcgttccgccgttccattaagtacgggcaaaaagatgcggcaaatgagattctccgcacggaagtattgagccgtttgcagaaaggggagaagggcttgtgcatcgtcacctatccggatgcattggcggagaaagtcgtatcccgtaaagaattgagcgataagactctgaaactgaatgtcggcgagaaggtagacacgacctttatcacggatgtgttgcatagttatggtttcgaatatgtggattatgtatatgagccggggcagtatgccgttcgtggtagcatcatcgacgtcttttcttttgcttcggaatatccttaccgcattgacttttttggagacgaagtagagagtatccgtacctttgaggttgaatcccagctatcgcgggagaagaaagaaggagtgtctatcgtgcccgatttggctgtgacgggagatgttactacctcgtttttggatttcataccgaaagagactaccttggcaatgcgtgacttcctttggttgcgtgaacggattcaggtcgtgcacgatgaggcgttgacgccgcaggcgatagccgtacaggaagtcgaagaaaatggcggtattacgttggaaggcaaactgatagacggcagtgaatttaccgtgcgtgcacttgatttccgccggctggagtttggtaacaagccgaccggtactccgaatgccagcatcacttttgatacttccgcacagcctatctttcataaaaacttcgacttggtagccggctctttcaaggagtatttggaaaaaggatataccctttatatttgtagtgacagcatgaagcagacggatcgtatccgggcaatcttcgaagaccggggggataagatcaaatttactcctgtagaacgtactgtgcatgaaggttttgttgataacacattgcgtctctgtatctttacagatcaccagttgttcgaccgtttccataaatataatctgaaaagcgataaggctcgttcaggtaaagtggccctgtccttgaaagaactgaatcagtttactccgggtgattatgtggtgcatacggaccacggtatcggacgtttttccggattggtgcgtattccgaatggagatactacgcaagaagttctgaaactggtttttcaaaatgaggatgtggtgtttgtctcgattcattctttgcataaggtctctaaatataaaggtaaggagggcgaagctccccgccttaataagttgggaacgggggcatgggagaaactgaaagagcgtacaaaaaacaaaatcaaggatattgcccgcgatttgattaagttgtattcgcaacgtcgtcaggagaaaggcttttcttatagtcccgacagtttcttgcagcgtgagttggaagcgtcttttatttatgaagatacacccgatcagagcaaagctactgtcgatgtgaagaccgatatggagagtgaccgctcaatggaccgtctcgtctgtggggatgtaggctttggaaaaacggaagtggctatccgggcagcttttaaggcggtggcggacaataagcaggttgcagttctggtgccgaccacggtgcttgcttatcagcatttccagaccttccgcgaacgtttgaagggattgccttgccgggtggaatatctgagccgtgcacgtacggccgcacaggcaaaagcggtgctgaaagaattgaaggaaggtgatgtcggtatacttatcggtactcatcgtattttgggaaaagatgtccggttcaaggatttaggattactgattgttgatgaggaacagaaattcggtgtttccgtcaaggagaagttacgtcagttgaaggtgaatgtcgatacattgactatgactgccacgcccattccccggacgctgcaattctcattaatgggtgcgcgagacctgagtgtgatctctacaccgccgcctaaccgttatccgattcagaccgaagtgcatacctttaatgaagaagtgataacggacgctatcaactttgaaatgagtcgtaacggacaggtgttttttgtcaacaaccggatagcaaacctgcccgaattaaaagcgatgattgaacgtcatatccctgactgtcgtgtggcaattggacacgggcagatggaacctgccgaactggagaaaatcatttttgattttgtcaactatgactatgacgtactccttgcaactactattattgaaagtggcattgatattccgaatgccaatacgatcatcatcaatcaggcgcagaattttggtttgagtgaccttcatcagatgcgtggccgtgtagggcgcagcaataagaaagcgttctgttatttgttggctcctccgttgagtagcctgacagcagagggacgccgtcggttacaagcaattgagaattttagtgatttgggcagtggtatccatatcgccatgcaggatttggatattcgcggtgccggtaacttgcttggagccgagcaaagcggatttatcgccgacctgggatatgaaacgtatcaaaagattctttccgaagctgttcacgaattgaagaatgatgaatttgcagatttgtatgcggatgaaatcaaaggtgaagggcagattagcggtgaaggttttgtggatgaatgtcaggtggaaagtgaccttgaactgttattgcctgctaattacgtgacgggcagtagcgaacgtatgttgctttatcgtgaattggacggtttgatgctggataaagacgtagaggcattccgttcccgtctggaggaccgtttcggacctgttccgccggaaacggaagaattgcttcgtattgttcctctccgccgtctggcagcacgcttgggagcggagaagatcttcctgaaaggtggtcggatgacgttgttctttgtctccaacccggatagtccgttctatcaaagtcaggctttcggtaaagtgatagattatatgatgaaatatacccgccgttgtgacctgcgtgaacagaacggcaagcgaagtatgctgataaaagatgtgactaatgtggaaactgcggtgagtgtgttgcaagaagttgtggcgttgccggtgaaagaatgatatattgttaatgaggaactcttttaatcgtttttgtttatatggaaagaagaattatttcttctttccatataatttatctatcaggtcctgacgtccgatacgtctcaactcattgataatgtttttccgttcttcgggcttataccagaagaagaattgtcgttgggcaagtttttcccgctgtgttttagcactgaagataggttccagtgtgtacgggtgaaatccggtataccaagtctcagtcgctactgtcataggagtaggggtgaagtcctgtacctgttccaagtggaagtccaggcgtttggtgataacggcaagctccgccatatcttcttctttgcatccgggatgtgaagatataaaataaggaatgagctgctgacgcaggttttcttcccggttgatgcggtcgaatatcttcttgaatgtttcaaactgttcaaaagaaggcttgcgcatgatggacaatacacggtcgcttgtatgttccggagctacctttaaccgcccactgacgtgactggctatcaattcacgggtatattcggccgtactgcgattggttgccgtatctttgctttgatgtagtaacaggtcatagcgtactccactgccgataaaggatttcttaataccgggcagagcgtctaccgcatgataaatatccaataggggacggtggtctgaatttaagttcggacaaactttaggatgtatgcatgaggggcgtttgcacttcttgcaaatcgcctcgtcttttcctttcatctgatacatattggcagaaggaccgccgagatcgcttaaatatcctttgaaatcaggtagttgcatcacctcttttacttctttcaagatagatgccttactacggctgacaatgaatttcccttggtgtgccgagatggtgcagaatgcgcagccaccgaaacagccccggtgaatattgacggagaatttaatcatatcatacgcaggaattctcttccctttgtatttgggatgaggcagccgggtataaggcaaatcgaacgaatggtcgagttcttcctgactcatcggagggtatggaggattgactactaccactttgtttcctaccgcctgtgtgatgcgtgaagctgcatatttgttggattcttcttcaatatgccggaagttgcttgcctgcttcttcttgtctgccaggcattcttcgtgagaataaagttgaatgtcttcttcggctgccgtccattctgctgcacggcaaagataggctgtttgaggaattgttccgacgatcgttttaaattcgttggttgtcaacgtggcttgttctgtggggagcaagtttttcattttgcggattaattctacaataggtttttcgcccataccatagatcagcaagtctgcgccactgtcacataaaatgcttttttgtactttgtcctgccaataatcgtaatggctcaagcgtctcatacttgcttcgatacctcctaatattacgggggcatcgggatatagctttttcagaatttggctataaacgatagaaggatattccgggcgcatatccgggcgtccgtccggtgtataagcgtcttcgctgcgcaagcgtttgttggcagtatatttattgaccattgaatccatgcttccggcggaaatgccgaaaaataaacgggggcgtcccaatttcttgaagtcacgcaggtcatcgcgccagtttggttggggaacgatagcaatttttaatccttctgcttcgaggatacgtccgataacagccgctccgaaggaagggtggtctacgtatgcatcaccgctgaaaagaatgacgtccaattcattccagccgcgaagttctacttctttttttgttgtaggtaaccagtcagtcagtcgaaaatctttcatgccgcaaagatacggataaacttataaagttataagatgatagggctataaagttcagccacgcctcttatcaccttataactttatgctttatcgctttgtagttatttctttgcgattgtaaattgcacagtcaactgttcgccgtcatagatctcacgaaagccgatgctttgctctgacagatattcttttaaatcctgaaatgcgtcggcatggttcatgatgatttctagcgtttcgccgggaacagcgttacacatggctttgattgcgggaattaacggactgtatgccgttgttccccgggtatccaccgtaatcattcttcctcctcttcttctgcttccggactggagagccaggtcagatagagcttgataagctgttgcaggccgaacgctttcatattattgtgataaatcacatcaatacaaagatccagcaaatctttactgtcttcttcctgactggcgataagagagcggacattcaatttcagtttgtccagcaccggttcgtctacaatacctgtactgtcaatcaggtgacggaacagagaatatttttcaattgttcttagattttcagtagatacctctatgctgcgtgtaccgctgggatttgcttgtatagtatacattgttctttagttttaagagttattgtttcttgcaaagatagaatttaaaatgaaaaacaggctataaaaagggatattttttgtttccctgcaatgaactcttatttttgagtaaagaatcccaatatgcctgccataacgattgcacggtctgcttccgacaggatactttcaaaagggaaacccagtacgaaggtacgatagtttcctttataggcaatacctgcactttgattgccaggcgcataagtaaataccggaaatgcggaatctaccgggacaatgcaatccggagcggggatcgcatagttgttctcattgggcaatcggggaatactgattgtgtgtccgagtccgttgatccgattagaatttttgtccgtcagactaccttgatacccatatttcagaactctttgtgtaaattccctgtttccttgcgtgccattcatgtcactgcctacgtatgcaccactcacaagtatatttccgccggattggcaataactggagataatgcgttgcattgccgaagaaaatgttttgtaataagccttagctgacgcatcctctttctcaagtcctaagatataatctacaatcggataatcttccaacgtgacgattccgttttctaccgcttcgtcactgcatgatacgaaactgtattttccggttgcctgaatcgctttcccatgaatgaatggataatcaaatgtatttcctgctattttcattccttccaattcactactgctgtgccccaaacttcctttcccttctttccccgcttgtgtgcggtcgaatccgctttgtactccgcagaatgagaaattcgacagatacggaactcccggatcctgctctaagtcgaatcctgctttatccggagtattgatgacggccggaccgctgatcctatcaaatccattgatgattaaaactttttcacgttcatgttttgctttgtaggctgagagtatttcagaagggaaactctctccacctctgtttgcggccgttactttgaatgaataaaccagtcccggctctatcttaacagtgtatgaagacttgctgactaaagttccgttgtcaaaacctccgtaaccaatgcgtgtatatacaatgtattcccgtggacgtgctgaaggctcctgcgggtcatcttctcctttccacgaaagttccagcgtattcttttttttgccgaaacgaatagcaaagttgctaacaggaagcggttgtaccacataatctttatcatgttggctggtaataaactgcaaaattcctttgtaaatggcgcgtcctaccgtgaatttgaagttggggtcatggccgagctgcatatcggcaaagttctgatgtgaaagcagctcgataatggtggaaggcgtagccggaagccgtgtctcgctataattccggttccacatactgcgccgtgtccaagggagattatagcttgaacgaatatctttttgaatttgtgtgagcagaatatccgccaaatcacgtgaagcataccggtccgttcccatattcagtttgccgttattgaaatcagtagtgtaaatgccgagcgaaccgatgatttcgtccgttttgctgcatccggcatcactgtgaagtgccattgtcatttccaatggtactcctagccctggttgcgtaggattataaacagaacctcccgatagataattgattgtattggagcgtgtgttgatatcgtccgcataatcattctcgcctttacgcccggcatatacatcgtaaggcattcccgcccactgggcagagtagcgtgccccttccagatagcgcggcaatccgcttatctttcctccgcgggaaatattgcccattcctccaccgaaacgcaccgcatcggcacatactacaccatgttcgctgctttcattactcaataccaccatgccataatcgttgttgcctttgtcaaattcaaaggtgccgaggtatacccaagttcctccgcctatcttttggtttactttaaattccgtaacccctccattatgaaagacaagatatttggcgtcacttacgctgttgggtaatgtctgataagaaacataaacagcgtatgttccggttgccggcagggtaggtacccattcggcaaaagcttggtccttgttcttctttttctttctttctgtggagatcattcggcaagtaccgtctgcgaaaggattttccccatcttggtagattgttttcttttgggcgaatcctcttaccgaggctctgtcccatttagcttttttactgcctacctccagatagagagaagcgttaggcgtatcattatccacaatgatttcattcttttgcgtatcccgttcgcgaggcgtgtagacaacggcgcctgcattttccaacatcggaattacataaggaagaacaaaagattgagtgaacagatcttctgttgtgcagaacaagcgggggcgttgccagccccattcgtttttatcgtttttgaaataattaccgtggctttgccagacagcgatatggcggtcttgtaacccgcgtgatacttcattggggcgtgagatgtttttcacccagggaactcctttataatcaatgtccaaagacatccgttccttatcttttttcttgtttcgataaaggttgggcactaaattttcaatcggcttgccgtctgcataaatagtgagctggtagtaatgaaccggaccgggaagtaaatcttttacttgattataaatagtctctacggtttccgaccgaaaaggttggtaggcaaagctttcagaggcataaacagcaattgttttgcggtcataatcaatgtcgaagctattcagttttggggtgctgattttggcagttgcggtatatttattgaaataatccgttagccgctcttttatattactttcgatgtcttgggcaaaaagaatattaatccccattgtcagatatatgaagaacactattatttttttcatcattcaatgcttttaggttttccccgcaaaaataaacaaaaaagagtgagaagtatcgaaacttcccactcttctttcattgttttatattctcttaattaagagcttttctatttatagcggaatatattctacgaatgcttccatagcttcgtaagaagccagacctaactggtcgtacaaagtagctgtgccacgattacggtcttcactgcgctgccagaacaaacgttcgtcattacccaggaacggagcactttccatttgtgactgatgtttcaggatagagttacgttttgcacgaagttcttccggactgataggcactgccatttcaatgttttcaatttcccattcagcccatgcaccacgatacatccagatacggcagtctttcaaccattttgcaccttcttctttttcgaggtcgacggcagcaaatacggcgtccgtacatacacggtgtgttccgtgaggatctgcgaggtcaccggctacaaaaatctgatgaggtttcacttcacgaagcaggttacgtacgatttccacatccgcttcactaattgggttcttctgaatcttacctgtttcgtagaatggtaagtcgaggaagtgacaacgttctagtggtatattgttataagtacaagcggtacgtgcttcaccacgacgaatcaagcctttgatagtaagtatatcacggctgtccatatcaccgtctttcttttctttcaggaagttacgtatttctgcatacttctcattgataacctggtcttcgctgttgttgaagagttggttgaatccgttgatgaaatgcatgaaacgaactacttcctcatcacctacggcaatattgccggaagtctcgtaagctacgtgcacctcatgtttctgttctaccagacgacggagtgttccacccatggagattacatcatcatctggatgcggagagaagataatcacacgtttcgggtatggtttggcacgttccggacggtaagtatcgtcagcattcggtttgccacccggccaacctgtgatagtatgttgcaaatcgttgaatatcttaatattcacattgtatgccgaaccatacaatgccagaagttcgctcagaccgttttcattgtaatccttatttgttaatttcaaaataggcttacctgtcaactggcatagccaaacgatagcgctgcggattaatttatcattccattcgcaagaagtaaccagccaagggcgttggatacgggttaagttcatagcagccgagaggtcaagggctacatgggcattgttgtgagtttgcaggtaagatgcaggaatggtatcggagataggtccttctacacattctttaatcatagctgctttattttcaccccacgcaagtaaatagactttctttgcaccgagaatagttgatactcccattgtgatagaactgatcggcgtattatccaacgttccgaagattttagatgcttcattgcgtgaagcattatccagcaaaatcaggcgggtggtagaattcagtcgggaacccggttcgttgaatgcgatattgcctacgcgaccgatacctaacagagcaatgtcaattcctccgaaactttcaatgcgttgttcatacaaccggcaatattcgaagattgtatctttggcgattgttccgtcaggagtaaatatattctgtttgtcaatatcaatatgatccaacaacatctctttcaatgcattgaagttactgttgattgcatcagaagataacggatagtattcgtacatattaaatacaatcacgttacggaagctaaggccttcttctttatgcatacggatcagttcctgatatacatggctgggtgaattacctccgggaagtgctaatacgcagaaacgtcctgctttttgtttttcgcggatggtctgtgctatttctcgagcaatatagttagccccttcttctacagattcatagatgtccgtagggattttttcgagtcttgtcaagactgatttttcaaatgcattctccggtctgtagtatctgggggagacccggtggaggctgatttgagaactaagatttgttttcataaagttgtttattaagttatgtaagattagcgtccttacgactgtattttcacgacaaagatacaaaagaagtctatatgtttaactactaacatctaggtattgttgctatatcaagccgtttttaacatttgttttatagcaaatactaaagatgaaattcgtctgcatctttccaaaccggaaacttttccctgagccggttgagagcacccagttggaggcttgtcgtagctattccttcctgttcgtccggcaatgaggctatttcttctccgaaagcggaatagattttgcttcctccattatatttaagatgatatccgtccatgcctgttctgttgacaccgcatacataacattgattttccaaagcacgtgctcggagcaaagcgtcccaagccaggcgacgggggataggccagtttgctacatatattaataagtcatattcattcttgacgttccggctccacacaggaaaacggagatcgtaacatacaagcaggcagatattccacccatgatagggaatgatgatccgtttgttacctgcggaaaagtgttcggcttcacgtcccatgcggaacaaatggcgtttatcgtaaaaatagtattctccttcgggagtgaggaagaaagcacggttataaaactgtccgttatcagtggcaatatagcttccacagatagccagttgaaataaggatgcccattgtttcaaagtagagattgttttgccggaattgggctctgctaatgtctggctttgcatactgaaccctgtcgagaacatttccggtaaaacaacaatctccgttgttccacggaggctttgtagcttttcgtggagcaaacggagattttcttgtttattttcccaaacgatatcggtttgtatgatagaaactcgaatggaatccattatggttaatacttattgtctaatacttaaatcatatttctccaagagcaaagttctcaggatgttttcctttgaaatctttgtaatagagcttgatttccctcatgtctttattaatatctcccgaaggcataatggctttggttgccgaaatcgtcttcttttcatagtcgatgccaatcaatacgataggcacctgcgctttgagggagatataataaaatccttttttccagtttggattggctttccgggttccttcgggggtaatggccagatgaaactttttgcattcgttaaagtggtgaaccatttggtctaccaatgaagtcttccgtccacgatctacgggaatcccgcctacagctttgaaaattaatcctaatggaaaaaagaaccattcttttttcatcatgaaacttgtcttgcggcctaaagcaccgtaaaatagttttccaataaataaatcaaagttcgttgtgtgtggtgcggcacatattacgcatttatcataattaggtaccgtaacgtttgttttccaccctaacaggcggtaatagataaagctataaattgctttcttcattctgtttttagttcaattttccgatagcttcaataatctcgtttacctttgcattaaaatcagcacggaattttttataaaaaactttcacattgcccggttctgtgtggctgatacgggtcacaaattcatcctgcatcttcaatacttcagacatcagttcatctgctttatccttatctgttccagggataaacatgctgttgattaaacactcggtgaacaactctcctgcgatatagtttacgtttttctttagttctcttctacttgccataatctttacatttaatggtgaataataaaaaatacttgtggtaaagataggcactttctttgatttgtgcgaataaataatcgaaaaaacattattcgagcctttatctttttatttttatagtggtcgaaatcataaagtagcttatttttgttctttctcatacattatattatttataaaattatttgtgatgcaaaaaatgaataaaaatggatttagccgatgtgcagagatgtatatcgagcgtttacggaaagaaggacggtattctacggcgcatgtctataagaatgcccttttatctttcactacgttttgcggtacgttcaatgtatcgttcaggcaagtgacccggggacgtttgcgttgttatgggcagtacctatatgaatgtggcttgaaacctaatacggtttctacatatatgcgtatgcttcgctgcatttataatagaggagtagaatcggggagtgccccttatgtgcaccgattatttcacgatgtctatacaggggtggatatccggcaaaagaaagccttgccggttgccgagcttcacaggcttttgtatgatgatcccaaatcggagcgcttgcgtcatacacaaactattgctgctttgatgtttcagttttgtggaatgtcatttgccgatttggctcatttggaaaagtcttccttagacagtaatgtgctacgatataatcgtatcaagactaagactcctatgagtgtggaagtacttgatactgcgaaggaaatgattaatcagcttcgaagtaaccaagtgactccttctgactgtcccgattatctgtttgatatcctgtctggcgacaaaaaacggaaagatgaaggagcttatcgggaatatcagtctgcacttcgaaagtttaataatcgtttgaaggatttggcaagagtgcttcatctaaattcgcctgtatcttcatacactcttcgtcactcttgggcaacaacagctaaatatcgtggagttcctattgaaatgataagtgaatcattaggccacaaatctataaaaacaacacaaatctatctgaaaggtttcaatctgcaagaacgtacagaagtaaatagaatgaatttatcttacgttagaaattgctatgtaactagtgataaataggtaaaatgctgataataagcagtgaagtatgtgtgttacttcttaggtaatagaattaaatttgacgcaaagatagacaaaaaaagaaatagcaaacaaataatcctccattttttttcgttttatctgaaacatagggcaaaaaaatatccgaacatgaaataatattgtcttcatgctctgttgctaatttgtttatattcaaaaggatttcctctttcactaaagccagaaagccctttggtaccacatttgtcgatgtttttctctattttcattccgcttagtttcgattgtgtgtgttctgttacctaagaagtaacagaaatatgaatagtaaaaatagcagattaatcaattctttgagaaaattgctattggggaacaatatacaaattgagatggaacaaactaaagctgttttcaggaataagccatttattttattgaaaggcattattctacttctgattttcatattgacgaccagtttggttcgtgcacaatactccttgggatcgacaggacaattaatgatacctactgccgagatgcaggaaaccggtacgtttataggaggagcaaactacctacccgagcaagttaccccttctgttttcagttttcctacaatgaattatttcgtggatatgacactgttttctttcattgaatttacttatcgaatgacattactcaaaatgacaacggctacgggaagaacaggttatcacaatcaagaccgttccaatacgattcgtatccgtccgttaaaagaaagccgttattttccggctgttgtgattgggggggatgatcttctgactgaaggaaaaactccatattggggtgcctactatggtgtgcttactaaaacaatcggattccgttcgggacatcaactggcaattacggcgggttggtattttcatcagggtgataagcctgtatataataaaggacctttcggcggagttcgttatactccctctttttgtcgggaattgaaattcatggcggaatatgatacgcatggttggaacattggtgctgctatgcgcttttggaagcatctatccgtcaacgtgtttacccgcgaatttacatgtgtgtctgccggtttacggtatgaatgtacattaatacattaaatgaagatgaaaagaatagttggtatagtatatgtttttctctgttggggaatttcgttacatgcacagtccgttcgtgtgatcgaaactttgaaaaaactggaaatggagaatatctcggttgtagagaaaagtgacacgataacagcggcttttgagacttctgtgtatagaggagcttataatgggatcggtattgccatacgtcatttggttgctatgccagaaatgccgactctacaattggttatattagataatgcgttaccccagctgtgtataactctcccggcaaaactggttcaacagtatcagtccggtgaatacacgttggatgaggtatatcgtaatatggagatgacgacttctacaggaaccgccatgcgtcgtttgaaaggaataaaacgggaagacagtactttcggtaaggtggatttggtgttatatcctggtgtgatgttagtcaataatgtaacttataaactatataaggcggctcttgatctgcaacccgctctggaaatgcaattatggaagggggcttcgctacggatgcaagtcagtctgcctatcgtaaataatgaagatggaaagtgggactgtgttcgcttgggattcatgactttacgtcaggattttcgtttggctaatcattggaaaggatacctgacaggcggtaatttctcagatgatcgtatgggagttgctgcgggagtcggttatttttctgcaaatggtcggtggacggtagaaggtgaaggaggaattaccggttcttctcatttctacggtagcaagtgggagatgagtaagtggaaaagaatcaatggacggcttagtgtgggatattatgtgccggaagtgaacacgctggtgaaggtggaaggatcccgttttatttatggagattatggaatacgcggaacgctttcacgttatttcggcgaatatattgtgggtatatatggtatgtatacggacggggcaaagaatgcagggtttaacttctctattccgttgccggggaagaaacgcaaacggcatgcattgcggattatgcttcccgaatattttgcttttcagtatgatatgcgtagtgggaatgaatacgcccaccgttctttgggggaaagttataataccgagcctaggtctgtcgagaattcacgtttctggcaaccggatcatattcgctattatttaattaggacgagtgagaattgaacatgattgatatgaataagtattttaacaaatttgaaacattatgaaaagtgtaaaatggatgtatgtgagtgccatggcgatagcctttggtatgttgtcttttgctacagttgcatgtcatgacgatgatgacgatcctaaaccagcagaaggagaagtaattgaaactccgaaaccggtggtagagtattacattaaaggtgctgtaactgtaaaaggtgaaggaaaaagtggggtaaaagtgaaagttggcgataaagattgtataacggattcgaaaggtgagttttctgtaacggaaagtaatacgggaacttatgaggtttctgttgctcctaatggttatctttctcagaaaacttctgtgaaaattgctgataatgctgagaatcgtagtgtagtaaaagttgcttttgccttgacggaagtaagtccggtaaaagaagtggtattggatgaaatgacagatccaattactgtagaggatgaaagtacatcaaatgaggcgattcctacaaccacagaagactttggacaggttgagccggacaaagttgttgaagatatgcctcttgcgaaagtggaaattgtgatcccggcaggtgtaattaaagaagatgcgcaggaggatccgacccttgtgaaaaacggtaaagttgatatcagtgtaactacgtttgttcctgctcctaaagaggttgttactgaagttaagcctactgaggtcgtagaagctgtaaaaagtatacctttggctgctgctcaatttcagccgacaggtttgcagtttagcgaacctgtaaatatttctattcctaatcctattccgggggtaactttccctaaagcaactatgcaactttcctatctgaatccggataacggggaatgggaagtacaggctgctgaagttacagtgggtgaggctaattataaagctcctgttacacacttctctgcttatgctatagagaatcaagtaaatagtaaagtagaaaaagaagtaattcagaaagacgaaatccttggacaggaaagtcgtgacaatagcgagaatgcaaaggccttgacaggtatcgtgttgaagtataaagaaaaaacaggttgggattacgaaaaaggtagaggtgtagttgaggctataaaagaagcattaggaagtagcgttcccgaaaatacactaaacgcaatggctgcttatcttaaaactcgtatgtactcattaatgggaacaacatctggagtaaccgaaactgaacgtacatacaatacagtgaatgtaaatggttatactgagatgaactatacttgttatgccaagactcgtaaaactacattatctacaacagtagtgtatggcggaagcgaaaaaacaatatctgtctctgcgatacgttatacaggtgctgatcagcaatataagacggtaacttataatcctactcacagcggtggtaagggaggtagtatctaagatatttatttgagatatatagtaggggcttagatttattcgtagcgtgtgaatccctactttactatgctggttaggaaaagtacagaggtacatcttatctaatctagcttacgcatcagattttattttgatgcacatttccccttaatatcaactgtctgtgaagatcgttgatatgattttgatgttatctgtctgattgaagtcagtagaataagtttttaataattaattttttaagataaaacccttttgtgtatgttccttttttaataaaccctttggggcatattcatatagagtatagagagaggaggtcactgtgaagcggcttcctcttttgcatttgaatgaatccagtatcttctattgactgctaatataagttaatctttacaattgtgcttcttgtaatataaataaaccctatctttatcagccaatacaacataggcttaacaaaatgtcatgagcataactattaaaaacctcaataagatttatccaaatggaaaccatgcattgaaagatgtcaatctggagattcctacggggatgtttggcttattgggtcccaacggtgccggcaaatctactttaatgcgtattctggtagctctaatggagccaacttccggacaggttgaaatctgtggatacgatttgatgaaacaacggaaagaaattcgtggtattttaggatatctccctcaggactttcgtttctttgccaaatataaaacgtatgagtttttggactatgcagcccgtctgtcgggaatgactcaaaacaggcaaagaaagcaggctgtggatgaaatgctcgaaaatgtaggattgtttgatgtacgtgagcggtatgctaacaaattatcaggaggtatgaagcgtcggttgggaattgcgcaggcattgatacatcatcctaaagtaattattgtagatgaacctactaccgggcttgaccccgaagaacgtattcgtttccgtaaccttctttccgaagttagtgaaaatgacgtcactattattttatctacccatattgtaggagatatctccagtacttgtaacaatatggcgttgatgaaccggggggaagtttctttctatgggtctccgcaagatatgttgaagaaagccgaaggcaaggtgtggaggatcagagctggtggcgatcaattgcatgagattgataaaaaatatccggtcatatctactattccctcagggacagcttgggaggtacaggtggttgccgataaagtagaaggatacgaagcggagccatttcctcctaatcttgaacacgcctatgtatattatatggagaatcaattaaacctttggacaaacgactaaacacgatatgctgatatgacctttttatctaatatacaatcggtagcaaagtatgaaagcaagttattaataagaagttggttcttccgggtgtttacagtgctcgccataggtatcactactctttttaattttctcctatttgtatcggaggatacttacggattttggattgctatgtccattccgtcgaatataccttatctaattctgctattgctgaatacaggacaggctgtcattgctatttttcttgcctctgattttctgaaaagggacaagaaactggatacgtcggaagtcttttatgtccgtccgttaagtaatgccgagtacgtgattggtaagatctgggggaatctgcgtgtttttctgctgctcaatcttattattatgggcattacaatggcattcaatctgacagtgggagaagtggactggatagcttatttattatattttctgctgattagtgtacctacgctcgtttttattattggcctgtctatctttctgatgttggtgctgaagaatcaggcactcacttttgttattctgttggggtatatcggattgactgttttttatattgaggataagttttattaccttttcgattatatggcgtatagtctcccattagtaaaatctactattgttggattttccaattgggaagtaattttgaatcaccgggctatctattttctcgccggcctggcatttgtctttttcactatctctctattccggcgtctgcctcactcgtcgcgtagcaattatccatgggtctttctttctgtgtgtacactcttgctgagtttagcttgcggatattggcatgtgcattccattttgtatcagggcgatatacgggctgcatatacacgtgttaacaaccaatatgtcgctactccgaagctgtttattcatcaatatgatttttcggtagaacaacgtcttgatgactttctatccgaagtaaccatgaggggggtagctttggactcgtctgccgtatttacgttttgcctgaatccggggctgaccgtacgttccgttgattcggatggacaaccacttaaattcaagcgtgacaagcaaatcgtattagtggatttcggtacgaatctggcaaagggagacactgcctcagtgacatttaagtatgatggacaaatagataattcgttttgttatctggatattcctccggaagtgttacaggcttctaaaaagaaatttctgttcaatattgataaacaatactgtttccagacaaaggattatttattgcttactcccgaaacatattggtatcctcgtgccggaactggttatagtgatgaaaatccggactggcaacaaacttatttcagcaattaccatttgaaagtgaagcctctagcagggttggttccgctttcccaaggcgaaggtaagagcgatgaacatggggtttatacgtttaagggagattttccgtctcaaacaatatcactggccataggagattatcagcagaaaagtatatctgcagacagcatcctatatagtatctggcatctgaaaggacatgacttcttttcggcagctttggattctatccacgatacgatcccttcattaatacgtaatgttaaagaccaactggctcgaaactataaattggattatcctttcaaacggttttcgttgatagaagtaccaatacaatttgtgggttatgaacgtgcttggtcgcaagcacaggaaaccgtgcaaccggaaatggtcttatttccggaaaaaggggcattgtttgatgatatggatatgaagaaacaggttcaaaaccatatacgttggtcgagatatggagacaggaatgaaatcagtttgcaggaagcacagatgcgtacgttcaataattttatctggagatttgcgcaaacggaaggaaattataatttttcatccggtagcagaggaaaaggtaatctttcgtcagaggcaaatccttattttctttttccacaaatctataatttccggtataatattttttcttcggaatggcctgttgccaaccgggtgattgagttgtatttgcaaaaaaaatcagagaatggaggttgggagcgtcagattaatggtattagtaataatgaaaaggctgttctgttgctggagaagcgtacatttaaagaattgctggtcgatatggaactgcgcaacttgcagaataatatcgtcggacaggaagcaagccgtctttttgccagggcagaaataaatatgggcgtagaagcctttagggactcattatattcattgctgaaacgtaatacttttttgaatataaagtttgaaaatatgctcgacacattgggagagataagtcggacagatattcgttcattgttgggagaatgggaaaaaacaacacctcttcctttttactcgttaggggaaccaacattgactaaaattaccaataagggtggagaagaattttttgtattgaaaatgctgataagtaataattcggattatgatgggattattcacatggatattcgtaaagacggttggtggtatcagcctttggaagaccccagagccaaaacaaaaatagagatgcctgctcataccagtaaggaatttgtttcggtttgggaagatcagatccgtaatgttgagattaatactatggtttcggggaatcttccgaatataattagtcaagacataaataatgtcaaacaggaacgaaacaaaatagtcaaagacagtatttatatattgccggaatcttcgttcgatttgccgggggaaattattgtggataatgaagattctactctttttattctttccgctcctcccattgtggggctcttgcctaagtggttggacgaagtggaggaaacaccttttaaatattcgggtatatcctggtggcgtccgcctttacaatggacggctactaccaatgacagatattatggaaaatatattcgttcggcttttgtgattaaaagtggggacggcagccagactgctacatggaaagtacctgtaccggaagtcggtcagtatgacttgtattatcatgtattcaaggatgatgaacttcgttggaacaataatcttcagggggaatatcattttaaagtaaagtatggcagtgaggtagaagatgcctatgttaacctgagaaaagcaaatgaggggtgggaacaactgggtagttactactttgactcagatacgatccgggtggtactgacagatgaatgtaaactgcggtctgtaacagccgacgcagtgaaaatagtgaaacgatattaattaaaacagcaaactatatgcaaattgacttactactattaaaaagaatgctactggcaattgttgttttcatgggaattacattaccctcgcaagggcaaattcccttaacgattgacaaggctatggaaattgcgcaggaaaacagtccttctctccgccgttcctatatgaatttggaaaggtataaacagaacctgattgctcagaaggcttcgttgaaatcgcggttctcgttaaacctgaatccgttagattataacaaaaacaggcgtttcgataaccggctgtcgcaatggtatactaatgaaacgctcaacagtagtgggacttttcaaattgagcaacccatcttatggacggacggtacgatttcgttaatcaacaagttcggttggcaagacaataattccattttggaagggaataaaaccagcgaccgggcattcagcaatgacctctatttgcaattgactcaacctatcttcacttacaacaagcggaaaatggaattgaaacagattgaatatgattatgaaaatgctgatattagttatgctctgcagcggttgaatacggaaaaaagtataacagaccaattttatgctgtttatatggcgcaaagtaatttggaaatcagccgtgaggaactaatcaatgcccagcaaagctatgatattataaaaaataaggtagaagcggatttagcagccaaagacgaactttttcaggctgagttgaatctagcgacagctcgttcgtcggtagacgagagtaaggtgagtttggaaaatgcgaaagataagttgaaacaaacacttggaatgagattggatgaggatattttagtatttgccgaagttgatattaaacctattcaagtagatttggaacaagctatcacacatggattaggctcacggttggaacttcgtcagcgtgaaatagaaagtaaagaacttgagtttgaaatgattaagacgaaagcattgaatgagttcaaaggggatatctctttgtcattcggattaatgggagataaccgtcatttgaataaaatgtttaataatccgacacaaaatccacgtgtttctatcagttttactgttcctatattcgattggggggaaaagagagcacgaatcaaagcacaaaaggttgcacaacaaattaatgaacttgaatttcatgaagaaaaggtagatattgaactgaatatccgtcaggtatggcgtagtcttgagaatctccgtactcagatcaaaattgccgagcagaatgtgcaaaatgctcaattaacttatgatctgaaccagacacgttatcgggaaggcgatattaccggtatggaaatgagtcagttccagacacaactttcaaataagaaaatcacttatacgcaagcattaatcaactacagaatagaattacttaatcttaaaattctttcattgtatgacttcgacaagaatattcctattgttccgatgaaagatataatcgataaaaaataagcagaccatgaaacagtatcacattttaatagcattttctttattagcaactataggcttgacaagctgtggtgacagaccacaaaacgcacccaataacattgctactccggtatctgttgtcgaactgaaaaaaggttcgatcagtaaactgataaatacaacaggaacagtacagcctacttatggggtgtctctgaactctgaaatgagcggcttttataaacttcaaattaatccgaagacaggaaaaactttcaaaatgggagatagggtgagtaaaggtacgataattgtccggttggaagacaaagaatatgaaaacggcattgctatcgacgctaaaaagctcagtctcgaaatagccgaacaggagcaatcgaaacaaaaagcgctttatgaaaagggaggggtgacgatgagtgagatgcggaatacggaagttaaggtgacgaatgcccgttatgattatgaaaacgcacaactcaatttggagaaaatgaaggtaaaagctccgtttgatggtgtgattgttgacctgccccattatacaactgatatcagggtagagcagggtaagccggtagtaagtctaatggcttatgataaaatgtatatggatatcaatctgccagagagcagcatccgctatgtcaaggaagcacaaccggtatatattactcattacaccataccgggtgatactttgagagggaaaatcagcgaattatctcccgcaatcagttcggaaacgcgtacctataaaggaaaggttttagttgataacaatcaactaaaattgcgtccgggtatgtttgctaaagcagatattgtggtagacagagcagacagctccattattatccccaaggacgtgattctgtcgaaccgtcgtcgcaaatatgtatatgtcgttgagaagaataccgcaaagatacgtaatttagaaacaggcttagaggatgaatataacattgaaatcatatccggactcaaagtaaatgacaatctggtagtgaaggggtttgaaacattgaaggaagatgctaaagtaaaaattcaaaagtaaattattcgtatgacgaataaacgtgccttttgaaaataggaaatacttatgaagaatatagtcaaatttgcagtaggcaatccggttacaatttgtatgattgtatttgccctcttattgttgggaaaggtgtcatacgatcagttgagtgtcgacttattgcctgatctgaataatccccgcttgtttatcgaactaaaggtaggagaacgtcctcctgaagagatcgaaaaacaatttgtgaaaaacatggaatccatggccattcggcagagtgacgttacacaggtgtcttcggtgattaaagcgggaacggcacggattaccgtagaatatacttggacaaaggatatggatgaagcttttctcgatttgcagaaagctatgaatccgtttgcccagaataaggagattacggaactaaaaataacgcaacacgacgcgaatctgtcgccagttgtcctggtggggatgtctcatcagaatattacggatatggcggaattgcgaaggattgcggaaagttatatccgtaacgagctgattcgcctggaaggtgttgccgaagtgactctttcgggagaggaagtgactacccttaccgttcagactgatccttataaattaaatgctttccaattaaagatagaggatatcgcttcgcgtattgagtctaataatcagagcatatccggaggacgggtaagtgaattgggattgcagtatttagtgaaaagttcgagtctgttttccacagaagccgattttgaaaatttgatcgtcggatataaaccggtacagcaggagacttcagggaatagttcttctgaaactgtgacagatgtcaacaaggctcccgtctttttgaaagaagtagctactgtgcagtttgtgaatgcacgtcccgaaaacattgtacgtattaatggaaaacgtagtatcggtttgtctatttataaggaaatgcgtttcaatacggtgaaggtggtagacgaagtaactagtcggttggcagtgatagaagatgctttgcccggctatcattttcaggtaatctccaatcaggggacttttataaaaagtgctatcggtgaagtgaaaagcagtgctatattgggtattgtccttgctgtcattgtattgtttgtattccttcgtcgaatgggaacaacgttgattgtcagtctttctattccaatctctattgtagcaactttcaatttgatgtttttcaatgggcttacgctgaatattatgactttgggagggttggctctcggagcgggtatgctggtagataatgccattgtagttatagaaagtattttccggaatcaggaaaaaggagtgagtgttaaggaggcagtggttaccggaactgcggaggtggcaaatgcggttattgcttctactttgacgactattgtggtatttcttccgattgtttatcttcatggagcttcgggtgaactgtttaaagatcaggcttggacagttactttctcacttgtatcttccttgtttgttgctatcctagtgattccgatgttatatactcaactttccggcaagaaagtaaaaatggaagaagtgaaatcaatccgtattactagatatagcaagatacttcgcaagttggttcgacatcgttggtgggtaattggtatggcagtgttattacttgtagttacaggtttgctgactccgttcattggtacggagtttatgccgagggcggaaagtaaggcttttactgctgttgtgaaaatgcctgaaggtacgcaaatggaacgtactgctgcggctgtgggtaatctcgaagatttattatatactattgtcggaggcgattctctgtgtacgatatatagtcatgtcggagagggaagcggttcggaaaatgccatatttgaaggagaaaatacggcgatgatgaaaattattctttctccggagtgtattctttctccagaaaatgtaattgcccggttccttgaagaagcgaagaatcccgttggtctggaattatctatccgtcaggatgaaaattctttgagttctctgttgggtagtgaaggagctcctattgtagtggaagtgaaaggagaggagttggacgaaatagcgaagattaccggagaagtaaaggaaagaatgcaggaagtggatggggtgtatgacgttgtaacttctattgaagacggtgctccggaagtcgtgatttcaatagaccgtaccatagccgggatcaataatctgagtgttgctacagtgattgaacagttgaaacaacagttgagtggtaaggaagccggtaaaatggagtatcgcggtgagatgcgtgatatcgtgattaaagtaccggatatatctttaggagctctcggatcacttgttatcagaagtggtacacaagagtttttgttggacgagatcgctagtattactcatgggcaggcacctaaagagattctacgtcgcaatcagagccgtataggtaaaataatggctaatatggacactggcaaatcacttgataaagtgacggcagaagtgtgtttggctgttaaagatattgatttgcctgctaattatagtatcacagtgaccggagaagaagaaaaacggcaggagtctatgcatagcttattgtttgctttattgctttctgttgtacttgtttatatggtcatggcttcacagtttgaatcgttgttacatccttttacgattctgctgactattccgctggctgtggtgggtgctatcttgcttttcttcattactggaaccacgattaatatgatgggagttatcggtatcgtgatgttgggaggtattgccgttaataactctattattctggtagaccgtatcaaccaacttagccaggcaggaatggagttgactgacgccattgtagaagcaggacagcaacgtatccgtcctatcataatgactacgttgactacgattctggctatgcttccaatgacattcggatttggtgaaggtgcttcacttcgttcgccaatggctattgctgtgattggaggactgataacttctactttgatgagtttgatggttatcccatgtgtatattatgtccttgaaaagataaaaaggcgtataaatcaccgaactaaaaaaagctgaagatgaactttttactaaataggagaattacgatctgtatgctgtttattgcacttagtcttttgggctatgtgtcctacaaacagcttccggtagagttgctgcctaatgcagagcttccggtattgtttatccaagtgtcgtcgcagcaggatatggacccttcgtatgtggagtcggaagtgataattccgcttgaaggagctgtcagtacgataggaggagtagacaaactgcaatcttatatagacaggaggcaatcgaacatacaaattgattttaagaagaatgtcaatttcaagatgactgctcttaagttgcaggaaaaggtgaatgaagtggcagcatcttttcccagtggttttactgtgcaggtacagaaagttgatattgcacagatgaacaataactttatggtacttcaggtacggggttcgggagggacagaccgtgtcaggaacttagtggaggataatattctttccgatttggagaacatagatggtgtggcatctgtcaatatatatggcggacggcaaaaagcgattgagatacgtctccattcggaggtgtgcaaagcgttgaaccttacggcgtcaaagataagtaatctgctttcacagaatacgcaggagaaaacgtttgtcggttttgccaatgagccggatagtaagatttttgttcacgtaaatgcgatgtatacgaaagtatctgacctggaaaatattgtggtggctcccggacctgtcttgttgaaagatgtggcaaccgtattctttgatctgaaagatgaaaccacttatagtcgtgtaaatgggaaagaggctgtttctgtggtattgataaatgattcgcaggcaaatcttatagagctttcccaccgtgtttctgatgcgattgacaaactgaatgaaaaaatagttccgcttgatctggaaatagtcgttcaggagaataaggctgaaacgatggagaataacatcaatcaaatcattaacctggcattggtcggtggattgttggctgttttcattctctggctttttttgaaaaatatgcggctggtgttctttatcgcactttcaattccgatctcagtttatacggccttcaatttcttctatgcttccggcattactatcaatagccttacattagtgggaatggcacttgccattgggatgctactggataatagtgttgtagtgctggagaatatttatcgtttatccggaagcggctacacacccgagcgctcagttactcagggcactaaagaggtgtggcgctctattgtagcagctacgttgactactgtcactgttttcctgccgtttgtcttttcagataatttcctgattaaactgatagggcatcatatcggggtgtctattatatctacgctgactatttccttgtttgtggctttgcttttcattcctatggtcacttatgttattctgaaaaagaagaaaggaagaagtgtcgtttatgagaaggtgtcgattattcaacgtccgatacaagtgtatctggttttactgaagacgtgtatgcgtaatccgggagtcactatattcggagcggtgattttactttttgctactctgatattatcactgaccttgaatgtgcagcagatgaaagaagtggattcggatcggtttaatataagtgttgtaatgcctaccggaagtacccttgagaatacggacaagatagtcaaagtgctggaagaacgtctgaagaatttcccagaaaagaaagatttgatctgccgtgtccgggagaaagaagcaactattacgctcgttttgcaaaaagattatcaaaagataggtaaacgaaaaattacggacatcaaatcggatgtgcaatccaaagtctcgaacattaatggggcggaagtctatgtctctgatgctatgggaggtggacaggaaaattcggtattgagtagtcttggaggctttatgcgtttactgggtattggtgataataatgaacgagtggttgtcagaggttctgatttcgaaatgatgcaaatggtagctgaggaaatccgctacctactggatgaacaggaatttgtgcaacatactcatgtatcgtatactcctcgtcagccagagataaatctgaactttgacccgattctgctgactacttatgatatcaatcgtgctaatataacttcgggattaacggcactcaataacgagttttcttctgaagtgacttttaaagtgggagaagataattatgacattatcattcgcgatgaaattttgaaaaaaagtacagagacggaagaagaagcggaggagaaggttcaaaaagaaaagacagttgatgatttgcgtgctgttcggatagaaaatgcaaagggtggaatgcacaatctggaagatatagcctctattaattatggtcgcggacgttcgcggatcatacgtgtcaatcaggataaacaacttgaagtttattataatttctcaagagatgtgcagtcctcaaaggaattattgggaagttatcgttctgatatagaccaattgattgccggttataatctaccttcaggcgttgccttgcaagtattccatgaggaggatcagtttggagatttcaaatttcttattctggcagccttcattttgatttttatgatacttgcttctgtttttgagtctgtagtaactccttttgtattactttttactattccgcttgctgctatcggctctttgctggcgttattgctttcgagcaatagcctgatgaatgcaaatacgctgacggggttcttgattctgctgggagtagtcgtaaataacggaattatccttatagactatgctaatattttacgtaaaagaggatatcgccggaatcgggcattaatgactgccggaatgtcacgtatccgtccgattttgataacttctatcacaacgatcgccgctatgttgccgttggccatgggagatacggaatatgccggagccattggggcgccttttgctattacagtgattggtggacttcttttctctgccttattgacgttgattttgattcctactgtctgcatgggattggaaaatgtgctttggtggtatcgttctttgtctcgtaaaatgtggattttccattttgttctttttgtagttggcgttgtcagtatctggctatatgctgaaggaatactttggcagtctatctatttagtagcactgattgcgggtataccaggactgacttattttacacagactagtcttagaagagctaaatcgaaagtcatagatccgaatgaagaaatacacatatctgtccggaatctggttaagatatatgattggccgggacgtatcagtcgtcaatggcatagtggtctgcaaatacggaaaaggctgggaatgagtcgtgaatatcattctctaaaagactttgtcaatgtgttgtggcaattcggtatgttagcgttcggtgtttattttacttatttttttattcaaaatagactttggatatttctgttttcgtttgctatttatgcatcggctttgtacttgtggaaaaaaatacgttcttatttatattatcgttacgaaaatagtaagggagtaaaggcagtaaaccgtatgatattctggggacttcctcctgttatcttgttcgaactgttcaagcgactggataataacggtttggtggtaatgattgggctgttgtggtttgcgggtattgctatctacgttacctcacagtatctatatgaacataatgtaaatatagaacgtgttaccggacgatttgccggacttcgccgctcttacttccgtatggtaaagagtgttcctttgattggaaaacaacgtaaaccttttaaagcattgcgtggagtttcgtttgagattcagacaggtatgttcggactcctgggaccgaacggagccggaaagtcaactttgatgcgcgtgatttgtggcatattcgagcagagttatggcagtatctggattaatggtatggatacccgtatctatagggaagaattgcaaagcttgataggattccttccgcaggaatttggcacttacgaaaatatgacatcttgggagtttcttgattatcaggctatactgaaaggaataatagatgaggatttgcgtaaggaacggttagagtatgttttgaatgcggtacatatgtatgagcggaaagatgaaaatatcggttctttctcgggaggtatgaaacagcggatcggcattgcattgattttgctccatttgccacgtattctggtagtagatgagccgacagcaggactcgaccctcgtgagcgtatccgttttcgtaatctgttggtggaattgagtaaagatcgtgtggtcattttttctactcatatcattgaagatatatccagttcctgtaatcaggttgtggtaataaacaagggtgaactgaaatatttcggtgatccggcggacatggtggaaatggctaatggaaaggtatggcagtttaatatagataaaacggagtttgaaaaggcattggataaatctttggtcatacatcatatccagcaaggggatactatccgtgttcgttatctttctgttgagcaaccatacgaaggagccgaagaagttgaggccaatctggaagatgcttatctctgcctattgaagaatatgaattaaaagaaaagaatgatatgacatttaatcaattaataaagctgctgcctaaggtggtaaaatataatttgaagattatttttgccggaaagttcttttggtttctgttagcggcatttggattctttgccttttttatgtttcagagtgcgtggaaccgggcagaaattaatgaagggcttatctataatatactcatgttcccatgtttattgctgatattctacccggctgtcttcggcattcaaaatgacgaagacagccggatattggaaatactttttggtattcctgactatcggtataaagtatggggagtacggttactcatgatttacgtggttatttttgctattctaatcgtcttttcgtacatcgctatcttattgctgtatccaatcaatccttttgagatgtctttgcagttgatgtttccggttcttttttttggtaatttgacttttatgttttctacgattacccggagtggaaacggaacggctgtacttatgattatcattggcattgtactgatgtttttcagtaatatgaatagcatagaacgttcattttggaatattttgctgaatcccttccgtgtgcctgataattttcatccgatgatatgggaagggattcttatcaaaaatcgtatatttcttttctcctccagtctgatctggatgatgatcggtctgctgaatttacagaagcgggaaaaatttgtatagtataaagtttaaattataaaagattggaatcagaaataatatcccagattcacaaagcagcttcctttatcagtctgattggaatatcccaatgatatttccagaggaccgaaaacgctatccattccataacctgcgctgatgccgaacaattgtttgcctttcagtatttcgaagaagtgactgtccgtcaaaccgtagttgcctgtcagggtgaggtaatgaatacttcccatacgttgcctgaacttcagagaagtaatgataatagaattttccattaattccatgtttgttacgccggcaaaaggcaactgttgtggaatataaaaaccgtatacttcaccaccgatagcatttttcaggggataaggaattcctttccctatcaggacacgcccatagatcgacggaatgatagaaaaacggcgggtggcaggaatcacacttgcccacgaagcactcagtgcggaaaatggggcctgttcattgtattgcgccatattatcggtatagagtgagtaggcggctttgaaatcacttcctttggaggggaaatatcctttatcgtatgtgttatagtgcacttgtgcaaaatagctaaggaagtgttctgattctacatccaagccgataaattccggcttcttaaataagaagtctttgtatttataatattcgaaacggaatccgagaccaaaacggaaattcttataccatacatccgagaagccaaattcagctaaatgatatttgtaagtagtgttataggcgcgttctccttcttcatatatgttgatgtcattatactgaaacatatacgaaaaattgaagttgcgctgttgcataggctctaatgtatagtcaatgcgcgccgcataccgtttccctaatcgcccggtaagagatagtcgggaaggaatatgagttttgaggtctgccgttccattgattaataaagaggctatttcttccgaatcgaaacggatccccagattaattcttttttcatactttgcttgcagtaggaaattgaggtgataaccttcgggagtgtccgtcaacgtatagctggcactggaataagattggcttcctcttaattgatataatgcctgttctatctgttgggtggtaatattactattttctttcaggttgcattttttcattagccatttcttgtcgtcagcttctacaccggagaatgatatgtctgtcacataaattgtacgtacattggagagggaagaatacggaccatgtcgtttgggaacataattatcggatattcctatcttctttttcaaagcgagtaaggaattccattgtgctttagctgcttcttctcctcttcgcattaaagtgtcaatagcggccggagtaaaactagccgaagaataaccgtctacgtttacacgaatgtaagtatcggtaaggtctacattcttttcatgattggattggcaggtaatatctacgatttgccctaagatatcaggagcactgttcagcttatccgcttttttcaaggcgttttgtacatccactccgatgataacatcagctcccatagcttttacaacatctgccggatagttatttacaattccaccgtccaccaataccatactgtcttgtcgtaccggtgtaaatacacctgggatagccatactggcccgcatggcagttgacaggatcccgttgtggaatataatttgttctccattgacaacatttgctgctacacaagcgaaagggatggggagtttatcaaagttgatagaatcatgatagcccatagtcaagtctgaaaatagattggcaagattttgccctttgataattccgcccgaagaagccgcatctttgggacttttggtgaaaggtatggagacaatgaacttttccgaccgttcacggtcggtcaatgacatggcacttcgtttgatacggtcgcttaacagaaacgtccagttttgttttcgaaccatactgtccaattgctcgggagtataaccaatagcgtagagtcctcctacaatggctcccatactagttccggctatgtaatcgataggaatacccgcttcttcgatcacttttaatgctttgatatgcgccattcctttggcaccgccgccactcaaaactacacctacctttttgcgttgctcctgagaatataaggaaaaaggcaatagtaggcacattgataaaactaatgttgagaagatttgttttttcattaggacatggtctagtgttgatgatgtatatataaatacaaatgtagggcataatttgtttagttgttgaaatcggaattaaaaaaaatgttccaaaagtcggaaatgtggattaattctacactttgcagctaaactccccattctcacgaaagaatgtgaatgacataaatggttgattattagataacaaaagatcaaagtgattttggcacgcaaattgtataaatgtggatataacaaacataagttaaattaaataataagattcgatatgagattattcttttcgaaacatgaattgaaactgaggagaaagagaaccattgctgctataatctgtgcggtagttgtgttgggcgtgtattggatgttgacccgacctcagaaggctacgccggaaatgccgacagtcattgttgaaccggtagtaaaagatgatgtagagatatacggggaatatgtgggacgaattcgtgcccaacagttcgtcgaagtacgtgcccgggtggaaggttatctggaaaatatgctttttgcagagggtacgtatgtgaataagaatcaggttttgtttgtaatcaaccaggatcaatatcgggcaaaagccgacaaggccagagcacagttgaaaaaagacgaagcacaggctttgaaggctgaacgagatttgaagcgtatacgtccattgtttgaacaaaatgctgcaagtcagttggacttggacaatgctgaagctgcttatgaaagtgccgaagctacggtcgccatgagtgaggcggacttggcgcaggctgaattggaactgggatataccattgtccggtcgccattgtctggtcatatcagtgaaagaaatgtggatttgggtaccttggtgggacccggaggaaaatctctactcgctactattgtgaaaagtgataccgtactggtcgatttcagtatgacagcacttgattatctgaaaagtaaagaaagaaatattaatttaggccagcaagactcgacccgttcctggcaaccgaatattacgattactttagcagataataccgtttatcctcataaaggttatgttgattttgctgaacctcaggtagatcctcagacgggtactttctccgtacgtgcggaaatgcctaatcccaaacaagtattattgccgggacagtttacgaaagtaaagctgttgctggatgttcgcgaaggagcccttgttgttccaatgaaagctgttactatcgaaaagggcggagcttatatttatactctgcgtaaagatgacgcggtagaaaaacgtttcgtggaattaggaccggaagtcggaaataatgtagtagtggaaagaggtttggcggaaggagagaaggttgtagtggaaggtttccataaattgacaccgggaatgaaagtacgaatcagtacaccggaaacaaaagtaaaagacactacaactgaaactggaaatacttcgatagaaatgaaggataacacaaaaggagaataagagatgaaagttactttttttatagataggccggttttctcggctgtaatttctattgtgatagtgattgtcggaattatcggtctgacaatgcttccggtggaccaatatccgcagatcacgcctccggtagtgaaaatcagtgcctcatatccgggtgccagcgcacttaccgtgtcacaagcggtagctactccgattgagcaggaaatcaacggtacaccgggaatgctttatatggaatcaaatagctctaactctggaggtttctcggcaacggttacttttgatgtatctgctgatccggatttggcggcagttgagattcagaatcgtgtgaagctagctgaatcccgtcttccggcagaagtgattcaaaatggtatttcagtagaaaaacaggctcctagtcaattaatgacgctctgtctgacttctactgatccgaagtttgatgaaatctatttgagtaacttcgctacaatcaatgtgcttgatgtgattcgccgtatcccgggagtaggacgcgtttctaatattggtagccgttattacgccatgcagatatgggcacaacccgataagttggcaaattttgggttgaccgtacaggatttacaaaatgctttgaaagatcagaaccgtgaatctgcggcaggtgtattaggacagcaaccggtggaaggattggatattactattcctatcactactcagggacgtctttccactgtcggacagttcgaggatattgtagtacgtgccaatgctaacggttctattatccgattaaaagatgtggcacgcgtgtcgttggaagcttcttcttataatacagagagtgggatcaatggagagaatgctgctgtacttggtatctatatgttaccgggtgctaacgcaatggaagtggccgagagagtaaaagaggctatggatgaaattagcgagaactttccggaaggattgagttatgagattccatttgatatgacgacttatatctctgaatctattcacgaagtatataagactttgtttgaagcattggtgctggtagtattggtggtatatctgtctttgcaaagctggcgtgcaacgttgattccgattgtggcagttcctatctcgttgattggtactttcggattcatgttaatattcggtttctcgttaaatatattgacattactcggattgattcttgctattggtattgtcgtggatgatgcgattgtggtggtggaaggtgtggaacatataatggaaacggaacatctaagtccttatgaagctaccaagaaagcaatgaacggacttgccagcgctttgattgctacctcattggtgttggctgcagtattcgttccggttagtttcctgagtggaattacgggacagttgtatcgtcagtttacggtgactatcgtggtgtccgtacttatttctacagtggttgctttgacactgagtcccgtgatgtgttcgttaatattgaagccggatagcggaaagaaaaaaaatattatttttcggaagatcaatgaatggctaggtgttggtagcaataagtatgtagctgccgtaacccgtacaataaagcatcctcgtcgggtattaagtgcttttggaatggttctgatcgctatcctattaattcaccgtattattccgaccagtttcttgccggtggaagatcagggatattttaaaattgaacttgagttgccggaaggcgctacattggagcgtacccgtattgtgacggaacgtgccatagcttatttggaaaagaatccttatatagaatatattcagaatgtgacgggtagcagtccgcgtgtcggtagtaatcaggctcgttctgaactgactgtgattctgaaaccatgggaagaacggaagaataccagcatcgaaaaaattatggatacggtagagaaacacctcaaagaatatccggaatgtaaggtctacttgtctactccaccggtaataccgggattgggtagttccggaggttttgagatgcagttggaagctcgtggagaagcgacttttgataatttggtagatgccaccgataccttgatgtactatgcttccaaacataaagaactgacaggattgtcttcttctttacagtcagaaattccgcaactatattttgatgtggaccgggataaggtgaaaatgttgggtgtacctttggcagatgtgttctctaccatgaaagcttatacgggttctgtgtatgtgaatgactttaatatgttcaaccgtatatataaggtatatatccaggcggaagctccttaccgtgaacataaagataatattaatctattctttgtaaaagcgtctaatggggcaatggtaccgctgacttctttaggcaatgcatcatataccacaggtccgggaagtatcaagcgttttaatatgtttactactgcggtaattcgtggagctgctgcaccaggatatagttccggacaagcaatggagatcatggaacagattgcccgcgatcacctacctgataatatcggattggaatggagcggactttcttatcaggaaaagcaagctggaggtcagacaggtatggttatggcactggtattcttgtttgtattccttttccttgctgcgcaatatgaaagttggacagtacctattgctgtattgctttctttgccggtagctgcattgggtgcctatttgggtgtctgggtatgtggattggaaaatgatgtttatttccaaataggcttagtaatgctggtgggattggcggctaagaacgctattttgattgtagaatttgccaaagtgcaggtggataagggagaagatttggttcaatctgctatttatgcggcaagattacgttttcgtccgattctgatgacttcgcttgcatttgtgcttggtatgcttccaatggtattggcaagcggtcctggttcggcaagccgccaggcgattggtacgggagtattcttcggaatgatatttgctattgtatttggcatcattctcgtgcctttcttctttgtaatggtgtataaaacaaagtcgaaaattttaaaacataagaaataatgaaacgaaagaaactatatatggctatcttattatttgcaggaatattaacttcctgcaaggtagggaaaagctacgttcgtcctgaccttcatttacctgatagtttggctcaacatcaggattctgtcagtttcggagatcaggactggaaagatatttatgctgattccactctctgtagccttattgaccgtgctttggagcataataaggatatgttgatagcggctgcccgtgtgaaggaaatggctgcacaaaaacgaatctctactgcagctttgcttccggatataaaaggaaaagtaacagctgaacgtgaattggaaaatcatggaggggatgcgtttaagaaagcagacacttttgaagcccaatttcttgtttcatgggaactcgacctttggggaaatctgcgttgggcgcgttcggccagtattgctgaatatctgcaatctatagaggcgcaacgtgcactccggatgacgattgttgccgaagtagcacaagcttactatgaattggtagcattggatacagagttagacatagttaagcaaacattgaaagctcgtgaagaaggtgttcgtttggcacgtatccgttttgccggaggattgacttccgaaacttcctatcgtcaggcacaagtggagttggcacgtacggctactttagttccggatttagaacgtaagatttctcttaaggaaaacgatattgcttttcttgcaggtgaatatcctaaccgtattgcccgttcccgtttgcttcaggaatttaattttccggaaacacttccggttggcttgccttccactttgttggaacgtcgtcctgatatccgtcaggcagaacagaaattgatcgctgccaatgcgaaagtaggagtagcctatacgaatatgtttccgcgtcttgctctgaccggtggttttggtacggagagtacttcattgtcagaattgttgaaatctccgtatgcagtaatggaaggggctttgttgactcctatctttggttggggaaagaaccgtgcggcattgaaagcgaaaaaagcggcttttgaaggtgaggtgcataactatgagaaatccgtgctgacagcttttaaagagacacgtaacgcaattgtgaattttaacaagataaaagaggtgtacgaacttcgtgctaatttggaacgttcggctaagagctatatggatctggcacagctccaatatattaatggggttattaactatctggacgtattggatgcccaacgtggatactttgatgcacaaattggcttaagtaatgctattcgtgatgagttgatagccgtcgtacagctttataaagcgcttggtggaggttggaaacaataaggaatcgtaaataaaattgtgcttcctcttttataattcacggaaaaatgcgaaatttgcaacgcttttcaagtttaagaagaaacttactaacacctttaaataaaaaattaaagaaaatgactaaaagtgcattgcaaatcgcaagggctgcttaccagcccaaacttccgaaagcattggcatcaggagccgttaaagctgtagcaggtgctgctactcagtctgtagccgatcaggaagctatcaaagcattgttccctaacacgtacggaatgccgttgattacattcgaagctggtgaagctgtaactcttcctgctatgaacgtgggtgtcatcctttctggtggacaagctcccggtgggcacaatgtaatctccggtttatttgacggtatcaagaaattgaacccggataataaattgtatggtttcattttaggtcctggtggtctggtagaccacaactatatggaattgactgctgacattatcgatgaataccgcaatacaggtggttttgatatcatcggttcaggtcgtacgaaattggaaactgaaagccaatttgaaaaaggatttgaaattatcaaagaactgggcattaaagcattggttatcattggtggtgatgattctaatacaaatgcttgtgtgttggctgaatactatgctgctaagaaatacggtgtacaggtaattggttgcccgaaaactatcgatggagacttgaagaacgatatgattgaaacttctttcggttttgatactgcttgtaagacttatgcggaagtaatcggtaacattcaacgtgactgtaactctgcccgcaaatattggcatttcatcaaattgatggggcgttcggcttctcacatcgcgctggaatgtgctttgcaggtacaacctaacgtatgtatcgtttctgaagaagtagaagcaaaagatatgtctttggatgatgtagtgacttatatcgctaaagtggtagcagatcgtgctgcacagggacataatttcggtacagtattgattccggaaggattggtcgaattcatcccggctatgaaacgtctgattgctgaattgaacgacttcctggctgctaacgcagaagagtttgctcaaattaagaaatctcaccaacgtgattatatcattcgtaaactttctccggaaaactctgctatctatgcaagtctgccggaaggtgttgcacgtcagttgactttggatcgtgacccgcacggaaacgttcaggtatcattgattgaaactgaaaaactgttgtccgaaatggtagctactaaattggctgcatggaaagaagaaggtaagtatgttggtaagtttgctgctcagcaccacttcttcggttacgaaggccgttgcgctgctccatcaaacttcgacgctgactactgctactctttgggttacacagcttctatgttgattgctaacggtaagaccggttatatgtcttctgtacgtaacacaactgctcctgctgccgaatggattgctggtggtgtacctatcacaatgatgatgaatatggaacgtcgtcacggtgaaatgaaaccggttattcagaaagcattggtgaaactggatggtgctcctttcaaggcattcgctgcacaacgtgatcgttgggctatcgaaacggattatgtatatccgggaccaatccagtactttggtcctactgaagtttgcgatcaggcaactaagactttacagctggaacaaggtaagtaaacgataaacatgaagcggtgaacagtaaatgccatgcagaatgtatggttgctgttcgccgcttttttttcatttgtcaccaatcactaatttttaatcactaagacacttgccgtcacgtaataatccgatagctgccgttcaaaagaagaatgctgcttccaccactagaaaaaaaagaactgtttcttcttccaaatctccccgtgcttcgaaaaaagtacaggagaagtacggacgtgctatgcctatctggttgcgtaatattctgacagtgatgattgtcggttgtttttctgctgttttctactattttttcattcgtccttatgcctatcgttggaaaccttgtaacggtttaaaggagtatggagtttgtattccttccggatatgatattcatggtattgatatatctcattatcaaggaaaaattgactgggagagacttcagcggaaccagcaaacggctactcctttacactttgtctttatgaaagcgacagaagggggggaccataacgatactacatttgaggtgaattttgccaatgctcgtaatcatggctttattcgtggggcttatcatttctatatccctggtacggatgctttgaaacaagctgacttttttattcgtacggtaaaactggataccggtgacttacctcccgtgcttgatgtggaagtgaccggaagaaaggaaaaacaagaactgcaacaaggtttgaagcgctggttggaccgcgtagaatcacattatggggtgaagcccattctttatacttcttataaatttaaaacccgttatctggatgattccattttcaatgcttacccttattggattgcacattattatgtggattcggtgaaatatcagggtaaatggagtttctggcaacacactgatgtcgggaatgtacccggcattaaggaagatgtagacctgaatgtatttaacggtacattggaggacctcaaaaaactgacaattaaatagcgggcattatttttctgaacaactaatttcttctttcatttgttataatcgtattattattaaaaagatatacgattatgaattttgatatagctattattgggggtggccctgccggatatacggccgccgaacgggcaggggcgaacggactgaaagccgttcttttcgagaaaaaagcaataggtggggtgtgcttgaatgaagggtgtattcctactaaaactctgttatattctgctaaaattctggatagcattaagaatgcttccaagtatggcgtgtttgccgaatccccttcctttgatttatctaaaattatgagccgcaaagataaaacggtgaaaatgctgacgggtggtgtgaaaatgactgtcaattcttacggggttacgattgtggagaaagaagcttttgtagaaggggaagaaaatgggttgattcgcattgtttgtgacggagaggcgtattttgtaaagtatctgctggtatgtaccggctccgatacggtgattcctccgataccgggattggcggaagttgattactggacctccaaagaggcattggagataaaagaactacctaaaacgttagtaattatcggtgggggagtaattggaatggaatttgcttctttctttaacagtatgggagtgaaggtacatatcgtggaaatgatgcctgaaatattgggagtcatggataaggaaaccagtggtatgcttcgtacggaatatacaaagcggggagtttctttctatctggatactaaagtagtggaagtgaaacctgatagggtcgtgattgaaaagggaggcaaggcttctgcgattgaaacggataaaatactgcttagtgtaggacgtaaggcaaatttatccaacgtaggattagaacaattgaatatagagctacatcggaatggagtgaaagtagatgaacatttactgactactcatcctagggtatatgcttgcggagatattataggatattctttattagcacataccgccattcgtgaagcagaagttgctatcaatcatatattgggagtagaagatcggatgaactacgactgtgtgccgggaattgtttatacgaatcccgaaatggcaggagtgggtaagactgaggaagaactgataaaactcggactcccttatcgtgttacgaaactaccaatggcttattccggacgattcgttgcggagaatgagcaaggaaacggtctctgtaaattgattcaggatgaagagggcaaaatcatcggctgccacatgctgggaaatccggcgtcggagttgattgtcatagcaggcattgctattcagagaggatatacgctggaagaatttcagaagaccgtatttccgcatccgacggttggagagatttatcacgaagtaatgttttaatcccttatcttcgagacctatgattcgatgtatatacagtccttatactgatatttatttccatttagcggcagaagagtatttgttgaggcagggaacggaggatgtttttatgctttggcagagcgttccttctgttgtgatagggaaacatcagcgtcttcggtcggaagttgacaaggaatgggcgaaacagcaccggatagctattgcccgtcgcttctcgggaggaggggcagtatatcacgatttgggtaatgtcaattttacttttatagaaacagtttcgcgtttgcctgaatttgttcattatcttcagcgaacgttagactttctgtcattcatcggtatagaagctaaaggagatgaacggctgggtatctatctgaatggattgaaaatatcggggagtgcacagtgtgtacataaagacagagtattatatcattgcacactgctttatgatacagacctcacgatattaaataaggtattgaatccggatgtgatagctcatgacggcactttgtcttccgtatatgccgttccttccgttcggagtgaggttactaatatcggtagatatttgctggcggggagtgtggatgatttcaaggaaaatgcttttcaatatttcagtgaatcgcaatccgtcagttctttcagtgtagaggagaaggaagctgtcaactggcttcgttcggagaagtacattcgtgaagaatggatatgtaaccgttgatgtccggttaaaaatactttaacttaaaactttctatttcaacgtattgttgtaatgtgtcaaggttgaataataaatttactgtctatgtcaagattcgaaataaaaatgcctaagttgggcgagagtataaccgaaggaacaattgtttcttggtctgtaaaggtaggtgagtcggttcaggaagacgatgtgctttttgaagtaaacactgccaaagtgagtgcggaaataccttctccggtagcggggaaagtaatggagattttgtgtaaagagggagatacggtagcggtgggcactgtcgttgctgttattaatttggacggtgacagtgctagtgaacaggaaacttccaatgaatcgaactcctctcaggaaactactaaagagaaatcccataatgaagtgccgaaaccgggtgttgctgtcgaagaacgttggtactctccagtggtgattcaattggcacgggacgctaagattccgagggaagaactggataccctgcaagggactggctatgaaggacgattgagtaagaaagatataaaagattatattgacaggaaaaagagaggacttgttagcgagccgaaaccggcaacaataggaataacttcgactgcaaatgcaccgtcggctattatgcctgctgcttcagcgagtccaaagtcatctccggtacctgctgtacaatctgtggcttccactgctacacctcaatcatctgcccctatcaatacgtccggagtagagatgaaagaaatggaccgtgtccgtcggattattgccgaccacatggttatgtcaaagaaagtatctccacatgttacgaatgtgctggaagtggatgtaaccaagctagtccgttggcgtgaaaagaataaggatgtcttcttccgtcacgaaggagtgaagctgacctatatgcctatgattacggaagcggtagcgaaagcgctggtaacttatccgcagctgaatgtatcggtagacggatataatattcttttcaagaaacacatcaatgtcggtatcgctgtttccttgaatgacggaaatctgattgttccggtggtgcatgatgccgaccatttgaatctaaacggattggcagtcgccattgattcattggcattaaaagcaagagataacaaattgatgccggaagacattgatggcggaacatttactattactaatttcggtacattcaagagcttattcggtacgccgattataaatcagcctcaagtagctattctgggagtgggatacattgaaaagaaacctgctgttgtggagacaccggaaggtgatacgattgctattcgtcataagatgtatctttccttgtcttacgatcatcgggtggtagacggtatgctgggtggtaacttcctgcatttcatagccgattatctggagaactggaaaggttgattcaactgattgtttcattaataaagagttcattaactatgaaaaagtatgatataaaaaatacagatattgaaaccttgaagaagtggtatcatctgatgacattgggacgtgctctggatgagaaagccccttcctatttgctgcaatcgttaggttggtcttaccatgctccttatgcaggacatgacggaatccaactggctattgggcaggtttttactctcggcgaagactttctgttcccttattaccgggatatgctgactgtgctttctgccggaatgactgcagaagaaattatcctgaatggtatatcgaaagcgactgatcccggtagtggcgggcggcacatgtctaatcacttcgcaaaaccggaatggcacatcgaaaatatctcgtctgctacggggacacatgacctccatgcggcaggtgtagccagagctatggtgtattatggtcataaaggagttgccataacttctcatggagaatcggctacttccgaaggctttgtgtatgaagccatcaatggcgctagtctcgagcgtcttcctgtgattttcgtaatacaggataatggttacggtatctctgtcccgaaatccgaacagacggccaatcggaaagtggcagagaacttctcaggtttcaagaacctgaaaattatctattgtaatggaaaagatgtgtttgactcgatgaacgctatgaccgaagctcgggaatatgccataaccactcgtaacccggtaattgtacaagccaattgcgtccgtatcggttcccactctaattcggataaacataccttgtacagggatgaaaacgaactggaatatgtaaaagaagctgacccgttgatgaaattccgccggatgttgcttcgctataaacgtttgacggaagaagaattgctgcaaatagagactgatgcaaagaaagaattatcagccgctaatcgaaaggccttgtctgctcccgatcctgatcccaagagtatctatgactttgtgatacccgaaccttatcagcctcaaaagtataaagaaggtatccatcaggcagaaggagagaaaacttttatggtgaacgccattaacgaaacgttgaaagctgaattccgtcataaccccgatacgtttatctggggacaggatgtagcaaacaaggaaaaaggcggtgtgtttaatgtgactaaaggtatgcagcaggagtttggtgatgcacgtgtattcagcgcaccgattgcggaagattatattgtgggtacagctaacggaatgagccgctttgaccctaaaatccatgtcgtgatagaaggggcggaatttgctgactatttctggcctgccgtagaacaatatgtagaatgtacacatgagtattggcgtagcaatggaaagtttgctccgaacataactttacggctagcttccggtggttatattggtgggggattataccattcccaaaatatagagggagctttgacaactttgcccggagcacgaattgtctgtccttcctttgctgatgatgccgccggattattgcggaccagtatgcgttctaagggctttacattgtttctcgaaccgaaagctttgtataactcggtggaggcagcagccgttgtaccggaagattttgaagttcctttcggaaaggcacgtatccgtcgtgaaggaacagatttgagtattatcacctatggcaacactacccatttctgtttacacgctgccgaacggctggagaaagaaggtggctggaaagtagaagtcattgatattcgttctttgattccgttggataaagaaacgatatttgaatcagtaaagaaaaccagtaaagcattggttgttcacgaagataaagtattctccggtttcggtgcggaactggcggctatgattggaggggagatgttccgctatttggatggtccggtagaacgtgtcggttctacatttactcctgtcggctttaatccgattctggaaaaagaaatattgccggatgaggctaagatatacgaagctgccaagaatttgttggaatattaaattgtacagattatgaaaaagataggtttattttatgctactaaggctgaaagaacaagctgggtagcggagaagattcagaaagagtttggagaagataagatagaagtagtagcgattgaacaggcatggcagaatgattttgtagcttacgattgttttattgttggagcttccacgtggtttgacggtgagctgcctacttattgggatgaactgttaccggagcttcggacaatggaactgaaaggaaaaaaggttgctattttcggtctcggagatcagatacgctatcctgaaaactttgccgatggtattggcttgttggcggaagtttttgaaggagacggggctacattagtcggcttcacttcttctgaaggttatactttcgaacgttccagagccttacgaggtaatcagtggtgcggattggtgattgatttggataatcagtctgaacaggcaaagaagaaaatcaaggaatggtgtgagcaagtaaagaaggagttcgcataaatttctttatatgtgacatccctatgtccgacattcccattttgttatatgtgatgtccggacatggggatattgtttttttaggaaaaatcagttggaggggattagccttgataaataaactttacctctgcccaacggttcttctctttgtaatgtacaaaagccagtccgtttttttccgcttcttcacggataacagcaatatcatctacatagaatccactcatataaagctctgaacctggatgcatgcaggtaatgtactgcttcatgtcattcaataatatattccggttgatattggcgatgataatgtcaaaaggcccttttccggtaagtgatgaagcatctccttgtgaaacgtcgatttcgtctacatgattcagttcaatgttctcgatagaattgcgtacacaccattcatcgatgtcgatagctgtacaggggtgtgccccccgcatacgtgccaggatagctaaaatagaagtcccacaacccatatcgagcaaggatttatctttcagttcgttgtccagtaattcttcgatgatgaggcttgtcgtttcgtgatgtcccgtaccgaaggccatttgtgggttgatgacgatgtcatattccgctttgggtacattctggtgaaaagtactgtggattacacagcggtctccaataataatcggttggaagaaattcttttcccattcctcgttccagtccttgtcttctgcttcggtaaatgtgtaggtgatttccgtatcggatagaggaaattcagcgattacagttttgatagcgttttcatcacataccgattgttggatatatgcggtcagtccgccttcgcattcaacaaaactctcgaatcccacttcgcctagcactgcagttagtacgtcattaactgtttcggtacaaggacttgtatggaacgtgaactcaaaatacttcatagttgttttattttctggtaaataatatgcaaagatactacaaaccaagtatagaaaatcaagtttacttgaattttatgccaaggtgcaatgtatcttttactaagatagttagaaatagggatttccctattatcctttggggaaaatctccttcggacgaaaaatctcttccttatctttgtaatgtgaataagtttaagtaattacataaaccgagatgatatgaaaaagattgtttacttcttgctatttgccttgtgcctaccgataggcttgctggcacaaagcgttgatgacgacctttacttcgtaccttccaaagataaacaggagaagaaagaaactccggttaagaaggaaacgaaacaacaggtgaccaacatctatacttcaccgggtactaccgtagttgttcaggaccgtaagggaaaaacacgggatgtggatgaatataatcgccgttacgatgcacgtgataatgagttcgtaatggacaatgataccttatatataaaagaaaaatctaatccggatttggatggagaatgggtgaccggcgaatttgacggtacacaggaagattatgagtacgcagaacgtatcatccgtttccgtaatccgcgttttgctattagcattagcagcccgttatattgggacgtagtttacggaccgaattcctgggactggaacgtatataccgacggcatgtatgcttatgcattcccgacgttcagtaacccgctttggtgggattggcgttatggttcttacggctggggttggaattatggctggggctggaatcgtccttactactcttggggatattacccgggttcctggggcggctggtatggtggctactggggtggttggtatggtggtggctattggggacatcatcactattggcacggcggtcctagctggggctggggtggtggaagccattgggcacgcaacacttatacgggtcgccgttcatatgctcctagtagatatagttcttctacttctcgtcgttcagattatggtcgttcgcaagtacgtaggactactagcgtaccttctggaggtcgtgtctcaacggggcgagtagttggttcaagaagtgaatccatacgttctggagtatctactcgttcagatgtatcctcctcaagaagaagtacatatacccgtccaagtagtactcgtagtagtgggacaagtactcgcacctctactcgtgctagttcttataatagttcccgcggaagtagtgctcgtagttcatctacatattctccttcttcaagaagatccagttcgacatataatagaggtagttctgcttctccatcacgtacttattcgagggaaagcactcgtagtaactataatagtaaccgttcttcttcatcttctagaagttattctccagccagcagtagcagttctcgttcaagtggcggtagttattcaggtggcggtagttcgtcccgttcaggaggcggttcttctagtaggagtagtagaagataattagaagatagtattaatatgattaatttagattatgaagaagattataacagtaatatatactttatcttttgtgataggagccgttagtgcacaatctgtatatgatggtgtcaaaatagcagataaagatttgaatggtacagctcgttttgtaggaatgggtggtgcgatgggggcattaggtggagatataactacaatggggacaaatcctgctggtattggtatctatcggagtaatgatgtaatgacttcatttagttattcagcttatggaatggagagtaaatatgaaggtcaaaaatcaactatagataagaatagatggtcgtttgataatataggagttgtttttgctactaaaataggtaatcagactccattacgttatgtaaattttggatttaattataagcgttctaaatctttttataaaaatatgtcgatgtcggggatgatgggagtagttgagaatcctagtaatccgggatctccatattatgtttctcaaactaattctatggctttacaggcaactgatgcagaacgatatgtttgggataattctaggcagcacttggattttgataatgcaaataggatattctcagatcctgatgctggatggcttggggctttggggtatcaaggaggtctgacagaaagagatcggattgataatgaaccagatttatatgttccttttctgccggtagagccttcttctgtttttaattcaagagaaaaggggggaattgatcagtatgattttaatgtatcttttaatataaatgatcgtgtatatttaggattgaccattggggcctatgatgtggattatgataaatattctgggtatgatgaatcatataaaagaggagaaggttattctcttgaaagttataacaatatctcaggttctgggtttgatgtaaaaatgggattaatccttcgtccatttgaatattctccatttcgtataggttttgcagtgcataccccaactttctataagttaacatattctacgagtgcaatagtaaccaatgattatagagatgcaaaaactgatgaattaaaacgtataattgtagatacctatgattatgtaggagatatgaagcgggattatcgattggtaacaccatggaaatataacgttagtttaggatatactgtcggaacttctttagcattaggtgcggaatatgaatatgaagattattctacaatgaaatttaagtattcaagtaatgatggcggtggggatatggaatttgagaatgctgaagtaaagaactgtttgaaaggtgaacatacattccgtattggagctgagtataaggtaattccagagtttgcttttcgtttaggatataattatagttctgctgtatttagagatgaggctgtgaaatatattccttccaattctcttataactgatactgatttttctaataagagatcacagagtaattatacattaggaataggatatagaggaaaaatgttttatgcagatttagcttatcagttgtctacatataaagagaacttttatccattttataatgaatttgagttaactcaaggtgagtggactatggtaactcctccggccactaaagtaactaatacacgtagtcaagtactattaaccgtaggtatgcgcttctaaactaattaagaacagttttcaatttcaataataacttttgtgtgtgaaaaatcccaggaatgctgagtgtctacggcagttccagggatttttatttatgttcgtttttacttgtctgcgttatctacgcaatggagtgtgtccgtcaaagatgacacggttgcgggcgaacctcatgacaatcgcatttccggcacttacttcaacatcctgatttgctacgatttcttgtttttctccctctatggatacttctccaattacttctccagctttgatcgtttcttgtgggattaagttggttaattctccgtcagatacctttttgatattgatatcctcggcttccgcgctcttgtccaactcaacctttccgttaaaaagatcttgaatacctctgtttctcaaacgaagtttgatacttgctttaccgttatacggtctgccgtcctcgtcaagtaagatgacgggtacagtcattcgtttgaactttaaggctacgtttttagttccgcgaatggcttgagctattccgaatagatgttcttttcctccctttatactgcggtaacgttttcccaatgctctggtagcagcttcgtcagtcaattcggggtaatgagcatagaatgtaacagattcaacgtctgtgtctatctcgtcccatgtctgactatctacgcctagggcaaacggaagatagtcttgattggaaactgacattgagattacatctccagttgagaagctattctttacgggaagcgataaagcggcactgttacgagtaagcaagtcagtgatgctttggttgtcgatagaagtagagaagtcgatagcttctttactggggtcttgcaggttgtcttgttgttgacaaccaaacaggcatgctgctgttagaaaaactagaaggttttttcttttcatttgcagggttgttaattagttaataataaaaaagagaaatctaatattctattttatcctctttggctgcccaagcctcaaaggcggtaatagcttcattgggtagtaaaatttcggagggaagttttctgtcttctggtttcagttccagttcgtcgtagataaaagaatcgtcaaaaccgatatttttggcgtcggttttgttgttaccgtagtacatcttgtccagtcgtgcccaataaatagcacccaagcacatgggacaaggttcgcaggaggtgtatatctcatatccgctaagatcaaatgttcccagtttggcggctgcggcacgtattgcactaacttcggcatgtgcagtaggatcacaagacgttgtgacgcggtttacaccggtagcgataatcactccatctttggtggcgataacagcaccgaaagggcctccaccattttcgacattttcttttgaaagctctattgctttccgcattagttcttctttagtcatggcaataaaaaatattgttagttttatcctatttacttcttttcagaaataacatctttctacaaagatagaaaaaactaacaatataccaaggaacgatttcctttaattttctaccagtaccagcagacgccgaaagagaacggataaagttcgggatcttgaatactgataaaacggtaggaaatatccgtttaaagctttccgagaatcttgtccataacccagttggtcagtgtggcactttcaccgtcgcaggaacagatggatttacctaatagatggtctaccaccgcttggataagaggctgttgtacatgttccgggttaccgatacagatttcttcgcgtccgcgttcggtatgcagtccgataggttcgtaggtgaagacagaaaaacaaatcattcctttgtctccgatgatttctatacgatcctcgcgggccgagtcgtgcgctacgaaacaccaggagccgctacctaccaatccgttgtcgaactggaagcaggcacttaaggtatcttcggcgggataaagtcctccgcggttgctcttgtaaccatttgcttcgagaatgcaaccgaacatatcctgcaataaatctatctgatgcggggcaagatcgtagaagtaaccgcctccggcaatgtccgcttgtacacgccagggaagattttcacggttatagtccaggtcgcgtggtggctgtgcgaaacgtatctgtacattgataacgttaccgatagaaccgttttctacaagctcttttactttttggaagtacgggagataacgtcggtagtaagcaacgaaacaaggaatgcctgtttcttgcgaaatacggttgatacgggtacactcttcgtatgtctgtgccattggcttttcaatgtatgcaggcttacctgctttcattgccataatagcataagtagcatgagaagaaggaggagtggcgatatatatagcatttacttccggatcgtctatcagttcctgtgcgtcgtcataccatttcttgatacctctttctttggcataggcttttgcctttgcaccgtcgcgactcattacagctacgacttccgaatgttctactttttggaaagcaggaccacttttcgttttggtgacttcgccgcaaccgatgaatccccatttaattatcttttcactcataattgtaatacctattgtgtctgttttaacaaagcccaaagataaaactattttttgtcaagagcaactttattgattatagtattttttataaatcttttgatattctgatttcttttggaacttatccagccacgtattcaaactatcgagtaaaacgggggattgcttgctgactgcccatgagtagaactgtgtgaagctgatagccgtattgatatcaatctgcgacaaggaatccgctactgcccgtgcaatgctttcgtcacaaactgcatagtcaatgtctccgtgtgctactagtgaaatcaattgttcggggccatatttttctatttcttttatgtaaatggtgtctccgatttcatttcctaagttctgaatacgcaagatagaaggcgaaccttttacgacatgaagtgtccgccgggctaaatccagttggttacggatatagagtgaatcgttttctccattctctttgcgttgaaccaggacttgtttgttgaggacaatgggagaggtgagaagcagggaatcttttaatttgctagtcgccaatattccataagcaataacatcataacgcccttcactcagtcctttcagccgttcttcgaaactcatgactggggtgatttctgctttcagtcttttatcacgggcaaaggcctgtatcagttcataatggaagccggagatagtgtcaccgtccacataaaaactgattgagttgtattcggtagctacacgtagtattccttctttggcaatggcggcataatcacgcggatgccctaagggtttttcttgttttccgcaatatcggaaagtgaaaataagtgccaatataatgataacaggcactaaatatctgaatagtctcagtttcgggcgtgtctccataagccataaaggttttgttaatcatagaaattccatgaaagtccgaatttcaggacgcgtggattgataggatagtgaggagacagaaaataatctggtctgcttattccttggttcacgtgatacatcatcacatagaaacgtgtacgtttcagatgcaggtttgcatagacattcacaatcggataaccgcctatctcaactttgccttcttccggttgcaggtagaaattttggatagccggcatataggcgggtgcattgtatttcgtgaaatatcgcacgtcggcacctaattgcacgctaagcactttctttgctaatttaaactgcatataaaagttatgatacaaagaaagatcgggcaagggcaacacagtctggtcactggatttctgccaggttacttcattatctaaatgaaagatcccgagcttgaagtcctgattgaggcttgccgataatacttgaaggcttccgcttttctgttcgggcgttgcctgttggttgaaatacgtatagttcttgatgttttctactcccgctcttagccgggttttccagcgtgcaatacttagttccccttcgatacgggtacggaactccttatccatatcattgtcccacatgaaatgtttggaatggtaatgacgcatatagaaaggtgcaagctggttgctgacctcaccgcgggcaataaggctgacggtatctttccataacgggaaattcaggtctatatctccttttacattgaactgtccgattgcttttcctgcaagtcccacttcaccgattgcgtgatagtgaagaatattcccttcccgtttggataactctcctccgacgaatatctcgttttcattgtatttgtcgggtaatggtcctccgtccttattcatcagcgtatatttactgattttgtaagaagcgaatgcggtcaatccggcttttgcatatttgttgaaaccttccagtaaagcgatgccgattgtattcttgattcctacataagtagtactgtctcttacgaacgctttattgtccttatcaaaatatgtgttctgataatatccgtccgctacttcgtcataagaattgaagccatggcgtgcccgttctacctgaatggtgtgtataaaactcgtcaccggtacaaactcctgtttggcgggagtcgtgtcgttttcagcctgcggaatgtcacgtttgaatcctagattataacgttgagtcaggaatacataaaagtcatgattacggttggttgtttcgctcaatacagtaggaatgttggttgattcgtattcccttcgtccttcggccatttcctccggagcggtgatatatctgtcatcggtgatacctccgttttcattagtcttcagatagttgttactgtatattccttgcacctgatatctgtctccgatatagctgccgaaaactgcagcgttaaagtatgcagtattctgattgttgtagtatccccgtccgtataaataatcaatgttgaaaccgaaggccaacttcttgtttacgtttacagagaagtaggatttgaaacgttcttctccatttaccttattaccggctttatgatacgtcagattggtatagggaacattactgttcgtaaaattaaattctgtgggacggacaaagaaactggaaaaaggttccatgaaaatggtcggctccggataacggcggtcaaagaagatgcgtgacatacggggcgaccccatattggcgagataattgtaatgtccggtgattccttccgtgagattcgtgttctgaaagtggtgataggcggtgtcggcagggattatcgtccggtcgcccagctggtttttgatccgccacatatataaggtaggtggtaatccctttacttcaacgtttgcactatccagtctgtccggaatcattgcagggtctacctggttaccgtattggtcatatccgttttcgtcgatttgttgacgaccgggattaaactgtgcatggacagttgtcagccctacaacggaaagtaatatatataatagtaagattcgtctcataattggaggcaaagatacttactttaattgatttaatgataatggataattgaaaattatgttgcatacgtactatacgtagctaataattatcaattatccattgcacattatctgttaattaaacctcacggattaattccatacctttcttgattgcttcttcgttcatcggaatcaagtggtgatggcgttccggaagagttttcttcaatcccttgattacattttccaatgtcacaatcgggcggagttttaataaaccgccaagtacaatcatgttgaatgctttggcgttattcatctcgttggctgcgtccatggcatcgatacgatataccttgatatccttgcgggtaggagggttgataattccgtaaccgtcataaatcaggataccaccgggcttcaccttattttcaaacttttcgagtgaaggctggttcagaatgatagcagtatcatatttactcaaaatgggtgaagaaaccttgtcgtcgcttacaattactgtaacgttggctgttccaccgcgttgttcgggaccgtatgccggcatccagcttacttctttgccttccattagccccgaataagccaggatcttacccatagacaatacgccttgtccaccgaatcctgctataattatttcttctttcattgttctgttgacttttagcgttattctttatcttttaaatcacctagcggatagaatgggaacatatgttcttccatccatttgttagccttctccggagtcatcttccagcctgagctacaagtagaaacgatttccactaagttagaacctttaccgctcattgaattctcgaatgctttacggatcgctttcttcgccttacgaatcgccggtacggattgtacggactggcgggttacgtaagctgttccttccagttgggcagcgatttcggtgattttcagcggataaccgtggagctcgacgtcacgtccgtaaggacaagtggaacttttcattcccaccagtgtagtcggcgccatttgtccgccggtcataccgtagattgcattgttgataaagataatcgtgatattctcgccacggttcaatgcgtggatcgtttcggctgtaccgatacaagccaagtcaccgtcaccctggtatgtgaaaacgagacgatccggccataggcgtttcacggcagttgccacagcaggcgcacgtccgtgtgctgcttcctgccagtcaatgtccagataattgtaggcgaaaactgcacatcctaccggagagattcccaccgttttatcttccatgcccatttcctctatcacttcggctatgagtttgtgtaccacgccgtgactgcaacccgggcagtagtgcatggcattatcgttcatcagagtcggtttcttgtaaaccagattctcgggtttgattatttcttctttagtcataacttcttctccttatctgttggtgaaccgtataaaaaactccattagcttgacaaagattgccgcgccgcatacgtagataaacattttaaagtcttcctttcctacaacaaagtaggtgataatagccgcaagagccagtatcataaaaaggatgttcagtacgtttcttattttatcaggattcatcgtttcgttatttgattattttttcttccaaagcagttacaatctcgtccgggtcgggaacaataccgccgagacgtccgaaatgttctacctttactttaccgttcacagccaggcggacatcttcaatcatttgtccggcattcagttctgtaacaagcatacccttcactttgtcagcgtaagcagcaattgcttttgtcgggaacggccataatgtgataggacggaggatacctactttgatacctttttcgcgtgccagctccatggctttttgaccgatacgtgccattgaaccgaaagcaataatcagatattctgcatcttcgcagtttatttcttcgaagcgtacttcgttcttttcaatttcacggtatttagcctggaaacggagattgtttatttccatagcctccggtttcagttccagagaagtgataatgttcggcttacggcctttagcttttccggtagcagcccatgggcattgtgctatcacttcttcttccgtacggcgtggtttctgcgccggaagaaccactttttccatcatttgcccgatcacaccgtcggcgaggatgatagccgggttacggtatttgaatgccagttcgaatcccaacgcaacgaaatccgccatttcctgtacggacgccggagcaagagcaatcaatttgtaatcaccgtggccaccgccttttactgtctggaaataatctgcctgactcggctggatagtacccagtccgggaccgccacgcattacgttgacaatcagacaaggaagttcggcacctgcgatgtaggagattccttcctgtttcagacttacaccgggacttgaagaagacgtcagcaccatttttccgctacctgcgcctccatataccatattgatagctgccacttcactttccgcctggagtactaccatgccggttgtttcccacggtttcagttcggcaagcgtttccaacacttccgattggggagtaataggataaccgaagtaaccgtccgcaccgcaacggatagctgcatgggcgatagcttcgtttcctttcattaatacaacttcttctgccatattcttttcttttattctacttttactttatacacagatatacatccgtccggacaaaccgttgcacacgagctacatccgttgcaggtatcttctttcacttgccaggcatagttatagcctttcatattgacctctttgttgagggcgattacatcgagcggacacgccactacgcacaggttgcatcctttgcaacgctccgtgtcgactacgattgctcctttgatttttgccataatctttatttattacgttatctttgagttcgattactgattaaacatatcttttattgattgaacatatccttgtggtagaagttgaggatatctattaccatttttcttgcctgaacggcaggactttccggattgatatcaatggcaaactggtaattatccagtgcctgtttccaatctccttttttccggtaggcatttccccgtaaatagtaaagagtatctttctctttttcgacagaagtgtcttggagaagctggtccaattgctcaatcgctgtgtccacgtccccttgattgataagctcttttaggttgtctatttgctccatttctttcgtctttcgggattctgaaacgcaaagatagtttttatttatgtaaatggggcaaacgtggacggaaatttgcaacgttttgagtttattgcatattagatgaataaataattaaaagtggtttgattgacctgtatttcacgtttggggtggttgtaggtcacagtagattacaaaggtacggaagaaagtgaagaggtaaggatgatataaagttttgatatgtccttgtatatattgaaagataccgtatttttgtgcatatattaaataagataggttatgctggatgttattctgattatagtaagcgccctctgcatgatagccgggttggccggctgtgtgcttccgttcctccccggtcctcccatagcatatttgggactggtatttcttcattttacagataaggtacactatactccgacacagttgataatctggctgttgattgtagccgtggtgcaggtgttggactactttactccgatgcttggcagtaagtatagcggtggcagtaaatggggaaattggggatgtataatcgggactcttgtcggacttcttttcttgccttggggtgttattctcggtccgtttctgggagcagtgattggtgaattgcttggcaataaagagttctcgcaagcactcaaatcaggagtaggctcattaatcggatttatactgggcaccttgttgaagtttgttgtctgcggttacttttgctatcagtttatcctcggatttatcaagtgatactgatagaaaaaactgtgtttttgtacgctaagcgtttctttttctacatcaagtatgcagtcagtaatgaaaaggacttgacaaacgcatttttatgttgtatatttgtagaagtaacgtgcagtaaaactataaattaaaatttgaaaatgaaagaaagtaatccatataagcgtctatatttaattataataaagtgtaatattacaacagatgtcctaggtgatacttctggaatttagggtataactaatcccttcaaaggcttaaggctgcaatctattacaggttttgcagccttttttgttgtataaattctaatataagctactgcaatgccttttgaaagtttataataaactctatacccgtttataataaacgatgaatgtttttattataaacttaaaaaaagtttgtgtatgaaggataaactattttcaatggattatgaaagcgaaaaaacaaatgaatgttttggggatatttaagtggtaaatattgaatacatatttcccggatatacgcttggattattcaaaaaaaatagaggcagctattttatttgaggtgatcccccgaataataatagctgccttattttgtaagtcttttcaggcttattttattggaatcttatttatacggttctggtggcgtcccccttcaaactgtgtggagaagaactctgtcagaatcatgtccgcctcttcagtactgatgaagcgacccggcattaccaggatattggcgtcattgtgctgacgggccaagtgcgctatttctgcattccagcagagtgcggcacgaactccctgatgtttgttcagcgtcatattgattccgtttccactgccgcagatagcgataccgggataacattcacccgattctactgcaagggccagcggatgagcatagtccggatagtctacacttgcggtagagtttgttccgaagtctttgtaagcccagccttttgcttccagccagccgcgaacatattctttcagttcaaaaccggcgtggtcgcatgctaatccgattgttttcattagagcattgcttttacttggttatatacgttttcagcagtaaatccaagtttctcatccaatactttataaggagcggagaaaccgaaagattccaatccccaaaccttaccgtggcaacctaccagaccttgaagagtgacaggcaaaccggcagtcagaccgaagattttagcttctgacggaaggattgattcctgatattctttaggctggctacggaacaacccttcggaaggagcagatacgatacgtacctttataccgtctttgcgaagtaattcagtgccggccaccagtgtagcaacttccgaaccggaagctaccaggataacgtccgggttctcatctgaaccagctacgatataagcacccttggtggcttgttcgtaatcagttccagccggaagattagcgatgttctgacgagagaaaatcaatcctgtcggagtagacatattttccatagccagtttccatgcgattgtggtttcttctacatctgccggacggagtaccaacatagaattgtgtcccttatggtttttcagtttttccattaaacggatctgtacttcctgttctaccggttcgtgagtaggaccgtcttcacccacacggaatgcatcgtgtgtccagatgaatttcaccggttgttccatcagggcagccatacgtacggcaggtttcatgtaatcggagaatacgaagaaggtaccgcaagcagcgataacacccccatgaagtgacataccgatacagatacaagccattgacaattcggatacaccggcttggaagaatgccccactgaaatcacctttcttgaaagaatgtgttttcttcaggaaaccgtccgtcttgtcggagttggaaaggtcggcagaagctacaatcatgttttctacttgtgtagcaagtgctcccaatacagttgcagaggctgcgcgggttgcgccacctgctttttgttcgataacagaccagtctactttcggagcttttccggagaagaaagcttccagtttgcaggccagttctggatttgcttttgcccattcggcttttactgcatatctttctgctacgattttcttcagttcttctgcacgtttggcatacagttcggctacttccgggaaaatgacgaacgggttggccggatcaccattcaggttcttgattgtatttacataagcgtcgccaccgagcggagcaccgtgagtagcacagttggcttcgtagctgctaccgtctgccttacgtgcacctttacccattacagttttaccgataatcagcgtcggacgttctttttcagcctgtgcttctttgatagcggcacggatttcgtcaggatcgttaccgttgatgctaagtacgttccagccccatgcttcatatttcatggcagtgtcttcaacggtcacatctttcgtttcggtagaaagctggatgtcgttggagtcatagaacataatcagattgtccagacccagtgcaccggcaatgcgtccggcaccttgagaaatttcttcctggataccaccgtcggagatgtaagcatagattgtctggttcatcacctcgttgaaccgggctttgaggaatttggcagcaatagcggcacctactgcgaaggtgtgtccctgccccaacggaccggaagtattttctataccgcgcatgatgtctacttcaggatgtcccggagtagggcttccccattgacggaattctttcaattcatccaatgtgaatttacctgtcaatgccaatgtagaatagagcatgggagacatgtgacccggatcgagaaagaaacggtcacgtccttcccagcggggattttcaggatcgtatactagaaactcagaaaagagtacatttataaagtcagcaccacccatggcaccacccggatgaccggaattggctttttcaaccattgaagcagcgagaatacggatgttatccgctgcacgattcataagtttattatcgttcatatcattaaaatttaattgatttctgtcagattgttggcaaagataactctttatgtggatttaacaatcctaaagtgctatcttttttattaccaattcaacagtctttttgtttgtggtacaataagtatttgcccttaaattactgtaactctaatgtaacaatagatttagcaggaagtttcaccttcattgtgcctttattgatttttacctctttgaagggtgccggttttacaatattaggattttcaaaagatttgtgatctgtcagatttgccgaagtaaggatttcgccgactgcttttttgcttttatatttcccggattaaccgtgatttcctgtgcggttgtcgcgtacatttaccttttcgcattccaggtcgatcggaagagcgatttagttgagtaaccgtatttcgtaaatagcaggtgtccactcggttccgtcggggacaaagcgtatcgggcagctacctgtacttagttttcggggcaacagataggagagagtgataaaaccgtctttgtctgtttcgctgatagcaggatgaactgtcaacttctcattattcagtagaatggtaactttgttacgatcgtttttccgtattgtaatcatcaggcggccggcttctttctttactttcagatgatagctgaaccaacctttggcacggcggaaatgacggtcgttatcagttccggtttctgcttgctcatattggatgctatgatcggactccggttgctgttctcccgggaaaatcaggtcaatcgtctgattagccagttcggtggctttttgttcagccattgccatttctttctgaatagctttgaactgttcttcgcttgcctggcggaagtatacagcataacgggtattgtgtaaacggaagaatgggacaagttccaaaggcttgttttgtgccggataaacgtttccgttgaagctgaatgataaccggtctccgttgttcttatggatagaattgcggattgaatcgggagttccgatcaacgccggtacttcctgcaaaggtatttgtttgccatgagcaatgtgtccgccacggctgtcgtctgcatataaaccgtcaagatgttcggtgcctgtggaagctgcaaggacgataggaccgtatgagaaggcataatagtctttcttgtcggggatctgttccacgctgactctcatcggcaagttgaaagtaactacatctccttttttccatttgcgggagaaatgaagatagtgacttccttttcccgtgataataaccttccttttcccattgattttgacataataacttttggattggttagcccattccggcatgcgtattgctaaagtttgttgctttttaggggcttcatcaattcgtaacgttacttttccgtcatcgggaaaacgggtttcttgtgtcaaagtgagcccctgttctttccaggtcagctgtgacggaataaagaggttgacatataacgtgtctttttgatgtgcataaataaactcaccatacttggtgtgattttccagtcctgaacctacgcaacaccacatcgaggtttccggctgtgagtaaacccggtaatgtccgggacgcatgggggtgaaataaacaaatccgcccttgtccggttcttgtgacgctaagatatggttatagagtgcacgttcgtagtagttcacgtaattggggtccggttcattcgcattatatggattttgggagttctgataaagcattttagtcagccggagcatattgtaagtattacaggtttccggtccttgcacatcattgagcatggatgtgaagttatctgtcgggtggaaatgctcgcgtacactgtttcctccgatacatacggaacggtgattgacaaccgtattccagaaaaagcgggcggcgtgatcccattcggctgcatgattccaatctttatcattttgtgaaagttcggctacccgtttatatccgataactttcggtatttgcgtattggcgtgcatacctgtcagtcggtcttcatctttgataagcgggtcaagaatgattttgtgtgaaaatcggcgggccagttccagatatttcttatcgcctgtaatctctgctacatctgcaaaagtctcattcaatcctccatgttcgctgcgaagcatatcttgcatctgttcgtcgctgagaccggaagtgatgtcaatcatccagtcggtgaagtcaatcagcatttggcgggcgagttcgctacctgcgtagagataggcatcacgcaatccggcataagttttgtgtatattataaagaggcacccatttgccgttaaggtcgaaacctccggcacggatattgcctgttttaatttctttccagagttggagacttcccggagttcctccgataaatcctgtgccgacagcttgttgtgcacggtgtaactcatccaacatatagttgaggcgattgtaaacagcagtatctccggtggcggcatacatcatggacaaggcagaaatataatgtccgccgatatgtccgtccaatccggtattttcccagttggtatagcttggggctttaggcgttagtcctgcttcacgaaggaaaggggcgagcaggcggtcggggtttaaagcaagtatataatgtaaatcagtctgttgagcttgcagaaacggactatccaatagtttcacattctgtagagggaagtaagatacctgtggagcgttttgtgctttagccagtgaggtggataagataaatgcgagtatgagcgaggtggctttcataatagttagagtaataatgatttttagcgtcgatataacgagcctgtaaaatgcccgctaacttttagcatcgatttaacaagcttgcaaaatcagcccgcacaattagcgggcgttttgcaaacttgtttgactttggcagaaaattttatttgaatctgacagctgcttcctcaataggcaatcctgccttgtagctttcgatgtatgcgttaaagccggctagatcttcgggcgtaggtgatacctcgatacccgcgtcgccgacaaatacatttttatccagaaaatcggcaagggattgtttcttttcattgttcacaaggtaagaacccaatagggcaataccccaggcgccgccttcaccggctgtttccatgactgaaatcggtgagttgatagctgccgcaagtattctttggcctactccctttgttctgaatagtcctccgtgtcctgtaattctgtctactttgactttttcatcgttgaacaggatatcgttgccaatcttgagaactccgaccgaggcatataaatgagtccgcataaagtttgccaggctgaacttatcatttgccgaacgtataaacaatggtcttccctcggcaagtcccgttacaggttctcctgaaatgtaattgtatgagaggagacctccgcagtcagtatcaccagtgagggcaatattgtagagcttgctgtaaatctcatccatatttacggggatacccaggagttcctgatattctttgaacaggttgacccatgcgttgaggtcggatgtacagttgttgcagtgtaccatggctacgaggcttccgtcaggagttgtaaccatgtcgatcatttcgtagggttttgacaactctttctccaatacaatcatggagaatgaggaagtacctgccgatacgtttccggtacgctgcttgactgcattggttgcaaccatgccggtaccggcatctccttccggtggacagaccggtattcctgccttcaaatgaccggatacgtcgagctttctgctgccttccggtgtaaggacaccggcgttttcgcctgccgacagtactttgggcaaaatattctcaagtttccagttatattctttaggagcaatcagattgtcgaacttctccaccatttcagcagaatagttgttggtagccgggtctatggggagcattcccgatgcatctcctatgcccaatactttttcacctgttatttgccaatgtacataacctgcaagggttgtcaggaatttgatgtctttgacatgcgtttcgttgttcaggatagcttggtacaagtgggaaatgctccacctcagagggatgttatagacaaatagctccgatagttctgctgccgcccggcctgtattggtgtttctccaagtacggaaaggcacgagaatttcctctttctcgttgaatggcatataaccatgcatcatggcactgacgccgatagccgccagactctcgatttctatgccgtcatataacttcttcacattcgaacgaaggtcagcgtagcaatcttgcaatccggaccaaatggattcaatactgtacgtccaaagcccgtcgactaactgattttcccaagtgtggctgccttgggcaataggcctgttttcccggtctatcagaactgctttgattcgtgttgaaccgagctctatacccagaatggctttgcctgtttctattgttgatttagcatctaatttcatgtcgaaatcactatttaaggtttagcaaagtgctttattcaacatataataaacctcattcatgcgcagttctttcttgaagcagctgattgtggtatctttgttgatatgtaccatttcaatccctgcgatctcagcataatcttcccaatattcggctgtcaggtcgtaagagaagcaagagtggtgagttccaccggcgagaatccatgcacctgcacctacttcaaagtcgggcatcggaatccaaagtgcggaagcaaccggtaatttaggaagcggtttcggttcgatgcattccacatcgtttacaatcaggcggaaacggttgcccagatccactacggtagcagtacatcctgtacctacttttgaggtgaatacaaggcgggcagtctggctcttgcggatacctatgccgaggaagtgtacttccagacgcggtctgttggctgcgatgagcggacaaacttccaacatgtgcgattgcaggatagaactttgagcaccgtcgaaattcaatgtatagtcttcgaggaaagaacatcccttcggaagtccctgattcatcacccatacggtacgataaagagcagccgatttccagtcaccttcagcgccgaatccataaccttctgccataaggcgttgagaagccagtcctgggatttggtcgaaaccattatgttccaggtcgcccaagtcgtcaaagttggtagtgaagcctttggcccctttagctttcaggatagcgcggagagctaattctgcttttgcggcgttccatactttctgataagcttccgttgatttgtcttccaaagaagattcatgatcgtattccttgaaatacgtcgctaccaatgcatccacatcagcggctttgatttctttgtggtattccattagttcgcttaccggacaatagtctacgtgataacccatacgttgctcggcttctaccttgtctccgtcggttacagccacattattcatctggtcgccgaaacggataatcagcatgtcctgtgaatctgcccagcctgcacatacacgcatccagacagcgatcttgtgcagcgtgttttcgtctttccagtaacctaccaccactttacggcggatacgcatacgggtgcagatatggccgaattcgcggtcaccgtgagccgattggttcaagttcatgaagtccatatccattgtgtcccaggggatctccttattgaactgagtatgcaggtgcattaacggtttcttcaactgttgcaaaccgtgaatccacatttttgccggagagaaagtatgcatccatgtgatgacaccaatacatttttcatcattattggctgctttgaaaacagtctccacttctttagaagaattggctgttcctttatacactacttttacaggtagtttaccggattcattcaatccatttaccatttcgttagaatgtgcgtctactgcgattactgcgtcacctccgtacaaaagctgtgctcctgttacgaaccatacttcatattgatcaaatgcgttcatatctctatttaatttttgagttataattttagttgtttattgtccgtaatatgcattcggaccatgcttgcggctgaaatgcttttctatcagcagcgggttcattgttaaattcggatttacggtataagcgatacttgccattttggctacttgctccataactaccgcgttgtgtactgcatcctgtgcgttttttccccaggagaaaggaccgtggtttttgaccagtactcccggtgtatgtacgggattcaatccttcaaaacgtttcacaataacatttccggtttccagttcgtaggccccttttacttctgcttccgtcatatcggccgtacaggggatagcgtcgtggaaataatcggcatgagttgttccgatattcggaatgtcgcatccggcttgtgcccatgcggtagcataagtagagtgggtgtgtacgactcctccgatttccgggaatgctttgtaaagtactacgtgagtaggggtatcggaggaaggcttcagccgcccttcgacgactttgccttccaaatccactactaccatatcttctgctttcatatcatcataacttacgccactgggcttgattactaccagtcccgtttcacggtcgatagcagaaacattgccccaggtgaagatgactaatccatgctttaccaactcaagattggcatgaaatactttttcttttagttcttccagcatattgattataatttgaatttcgggtctttgcgatatgccctgctgttaaacttatacaaggcggcaccacgtttggaacccagtttgtcaattttatcagtcttttctatataatccatttcggcaacacgtttgcggaaattccgcttgtccattgcttcaccgtaaatggcctcgtataagctttgcagttgggataacgtaaagagtttcggtagcagattgaacccgatcggctctaccgatgctttctgttgcatcagtttccgtgctttctccaccatttgcgggtggtcgaagattaattccggaagttcgttgatgttcacccagtaggcattgtgcttctgaaccagtttgcggtcatactcattgatgttgattaatgcatagtaagcaacagagataacccgttctcccggatcgcggtcaatggctccgaaggttcccacttgttccatatatacattctctaatcccgtaagttctgccaatacacgtttggctgcgtcgtccacactttcgtctttttgtacgaatcctcccattaatgaccattcgcccattgccggttcgaagtttcttttcagcagtaacaggcttatttcgccttcgctaaaaccaaagataatgcagtcgataccgatgtagaaggtcggatttgagctataatagttattcattgttttgttgatatgagtttttatttaattaccagaaataccagtagaatgcccccgtgatagccaggatgatcaccgtgtggataatatcccagtgattccagcttgcacgtgtggaagccttttgttctttagtagctgtaccgaataccagtccctgaatcttttcggcagtgggagcttctgttgccagactgactacaatcacaacgataatgcagaacaggaacatccaaccgcagaagaacagccagttcatatcatagaacaaatatttgaatgtagaatctgccacttcacctgcattgctgtaatatacctttgcaccgagacgggtcagaccgatcaccataccggaaatcaatccccacatacctccttgcgcagaagtacgtttccagcagatgcccagtaagaaggctgcggcaatgcccggagccaatactgattgaacgtcttgcaagtaggtataaagtacatcgcctacgctacgcatgataggaatccagaggatacccaggataacgattaccacagtagcaacctgtccgataccgaccagtttcttttccgaagtctgcggtctgaaacgtttgtagaagtcgatagtgaacaacatcgctgacgaattgaacaaagaagccagagaactcatcaaagcagccagaataccacataccaccagacctttcacaccggcaggaagtaatttggctaccaatgtcgggaatgcagcgtcggcatttgcggttccgttttcgagcatcggaagaaaaccttcaccaccggcaccgatatatttctggtgtaatgcgaacgcaatcatacccggaatcaggaacagaaatacaggcaacagtttcaggtaagcaccgaagatagtaccacggcgggcttccatttcgttctttccggagagcacgcgctgtacgataaactggtcagtgcaccagtaccagaaaccgataatggcagaaccgatcaaagcacccagccaggggaaattcgcgtcatcattgctacggatcaagtttgtcattgtatcaccgtaatcattaacggtaactgctccgcaaactctcatcatttcgtcccaaccgcctaattccttaaaaccgagaacaagtatgattaatgaacccaacaataggataggggtttgaagaacggaagtataaagtaccgatttcatacctccgaagatcgtatagagtgcggtcaataccaccagccctatggcagcaatccagaaaaagtcgataccccacaattctttgataccaaatacctgttggaataccaggcctccggcatataccgtaacagctaccttagtcaacacataactaaccaaagagataaccgacaagattgtacgtgattggggattgtaacggcgttccagaaattccggcatggtatataccatgcttcttgtgtagaaaggaacgaatacccaccccagaatcaaaatcatccaaccttgaatttcccagtgtgccatagccataccacttgaggctccggctccggccagaccgatcaagtgttccgaaccgatgtttgatgcgaaaatagaggcaccgatcgcgagccatgttgcgtcgcgtccacccaaaaaataatctgcagagtcattctgcttttgtctgactacccaaactataataccgataagagccagaaaaaagactccgattactagccaatctaatgcttccacaataaatctgatttataagttaatattatttctctacggaaaatttgaaaatacattcactgttataagtttgtcccgggaggaaattgtctgtatagacctgaatacccggttcgttggtgtatacttccactgtgataccgctttccggggaagtcagctcggaagccggtttgttattgcgcgcaactagcattagcacggcaattcctgcaagtaagaaatgttttttcatggttttatttttaatgtaaatgagatacttatcttgttttgggtgtaaaagtaacactttggtttggtgtatcaaatacactcttgtatgttgtgcagcataaaaggtattttttatatgaattcgtattataaatgacgtgtcatagctgggaaatcatgtaaatgaatggaaattggtcctttttgactgataaacgcctgttaatggtgggatcgggcaaagagtgaattaggattctgattatctttgcattcataactagatataattttttttattaagaaccatgagaagatacacagaaatcttggctgtattagccttgtctgccggaatggcacttcatgcgcaaaccaatgaaatggtgattcaaacccgaaagttaggagcagaaatccaacctaccatgtacgggctcttttttgaggatattaattatgctgctgacggcggactttatgccgaattggtcaagaaccgttcattcgagttcccccaacacctaatggggtggaagacttatggaaaagtaacattgcaggatgacggcccttttgaacgcaatcctcattatgtacgcctttccgacccgggacatgggcataaacataccggacttgacaacgaaggtttcttcggtgtcggcgtcaaagaaggagaggagtatcgtttctccgtctgggcacgattgccacagggaggtacgaaagcaacattacgtattgaattggtcgataccaaatcaatgggcgagcaccaggcttttgccacacagagtcttgcgattgattcaaaagaatggaaaaaatatcagataattctgaaacccggtgccacaaatcctaaagcagtgctccgcattttccttacctctaaaggaaccgtagatttggaacacatttctctttttccggtagatacctggaaagggcatgaaaacggacttcgtaaagatctggcccaagcgttggcagatattcatccgggagtcttccgtttccccggcggttgtattgtggaagggacggatttggcaacccgttatgactggaagaagtcggtaggtccggtagagaatcgtcctttgaatgagaatcgctggcaatatacgtttacccaccgtttcttccctgattattaccaaagctacggattgggattttatgaatacttcctgttgtccgaagaaatgggggcggcaccgcttcctattttgaattgcggattgtcctgtcaatatcagaatagtgacccgaaggctcatgtcgctgtttgcgacttggatagttatattcaggatgcgctcgacctcatagaatttgccaatggtgatataaatacaacttggggaaaagtacgtgccgatatgggacatccggcgcctttcaatctggaatttatcggtattgggaacgaacagtggggagaagagtaccccgaacgcctcgaaccgtttatcaaagctattcgcaaagttcatccggaaatcaagattgtaggaagttccggcccgaattccgaaggaaaagactttgattacctatggcctgaaatgaagcgtctgaaagccgatttggtagacgaacatttttatcggcccgaaagctggtttctggctcagggggcgcgttatgataattacgaccgtaaggggccgaaagtctttgccggcgaatatgcctgccacggaaagggcaagaaatggaatcatttcaatgctgctctgcttgaagccgcttttatgaccggattggagcgtaacgcagatattgtgcatatggctacctatgctcctcttttcgcccatgtggaaggttggcagtggcgcccggatatgatctggtttgacaacctgaattccgtgcgtactgtaagctactatgtacagcaactgtatgctcaaaataaaggaactaatgtgcttccgcttaccatgaacaagaaaagtgtgacaggagccgaagggcagaatgggctctttgccagtgccgtatacgataaggacaagaatgaactgattgtaaaggttgccaatacttcaaatactgcccagtcaatctctttgaactttgccggattgaagaaacaagacgtattatcgaatggccgctgcatcaagcttcgttcacttgatttggataaggataatacgcttgaacaacctttcgccatcactcctcaagaaactgcggtgtctgttgaaggtcatgtgtttacaaccgagcaggaaccgaatacttttgctgtttataaatttacaaagaaatgacgataaggtttgttagataatagatttaagtcttaattgttaattgaaaagaaagggcggcttccgtaatggaaaccgcccttcttgattatttatatcggataatttcttattccaatctgcgtgaaccgtcaccgattaccacgtcatacactttcgggcttctgccgaatttagctttgaatgcttcttttgtcttttcaacgaagttgtcatacaattcgtctttaacaaggttgatagtacaaccgccgaatccgccacccataacgcgtgaaccggttacaccgtattctttagcgcagtcgttcaggaagtcgagttcttcacagcttacttcgtacagcttgctcatgccgtgatgagtttcgtacatcttctgacctacagtttcgtaatcatctttctccagagcatcgcaaacatcgagtacgcgttggatttcttcgattacgtattctgcacgcatataatcttcatcgctgatgtcagccttagcttcttccaacatttccatagtacagtcgcgcaggaattcaacgtgcggatgtttcttctggatagcggcaacagcagcttcgcagctctggcggcgtttgttgtaagcagaagaagccagttcgtgtttaacaactgaatccattaaaaccagacgatagccttccgggtggaatgggaaatactgatattccagtgaacggcaatccagacggatcaagctgcctgctttaccgaatacggaagcaaactggtccatgataccgcagttcacaccacagtaattgtgttcagtagcctgacccactttagccagttcgaacttatcaatcttgttttcaccgaacagttcgttcaatgcaaaagcatacgtactttccaaggcagcagaagaagacatacctgcacccagaggcacatcaccggagaaagcagtattgaatccttttacgtctacgccgcgtttaatcatttcacggcatacaccgaagatatatcttgcccagcttgcgcgtggagcgtcttcttcgttcagaccgaattctacataatctttcaagtcgatagaataagctcttactttatcagtaccgttcggtttgatttcggcaatcatacctttgtctactgcacccggaaatacgaatccgccgttgtagtcagtgtgttcgccaatcaggttaatacgtcccggagaggcatatataaatcctgtagtaccatcgaaatgtttaatgaagcgacttcttacgtgttctatatccatgataatttaattttataaggtgaataaattgagttcagtaatagattattctaccggaatatctttattgacatttttgcaacctaccagaccgtagtacagcaaatatgccaaagcagcaatgattacccagtaacttggcatgaaaccggcaacatcagctacccagccctgaagtacaggcaggatacctccaccgcaaaccagtaccataaacagaccggaagcagcagcaagatatttgcccaatccttctacagcaaggttgaagataccaccccacatgatagaagtacagaaaccgactaataccaggtacattgcgttgataggaacttcggcaaaaccgaatgacaaaccgcctgtctcaccttgttggagtacgggcaagttaaccaatgttcctgtggaggagaagatagcaaggaatactaaaattaatcccagagcagatgtaaaagtaagcatcgctttactggagattttagcgccaagtgaagcacctgccagacggccgaccaacatcaggaaccaataagttcctaccacgaaaccggagatagtagaagcaatgccggcaccgcctttttctacagggtcggtaaggaacaggttcagagtacccggtacacctacttcaatacctacgtatacaaagatagcgatagcacctaatacaaagtggcggaacttcaaagcacctttcatcaatgtgctgatcggttctgttgtggtagcagcattcggttccggaatacgtacaaataaaagtacgaagaatgcgaaagcaaacacggccattgctgtatacattacagggaaaatctgggaaatagtagctttttcgatagaaccggcgatcaggataccaacgaacatcggagtaatggtagccattacagagttgaaagagccacccacctggataagttggttacctttgttaccttcaccacccaatttgttcaacatcgggtttactacagtgttgagcaaacacatagagaaacctgcaacgaatgcaccgatcaaataaacggcgaaagccatttccgggcttgaatggccggataagaactggatacctacgcctacaaaaccgatagctactgcgatcagtgcagtcttcttatatccaacgcgttgcaacaagatgccgctcggaatacccattactgcatacgcgatgaagtttccgaagtttcctagcatacctagtgcgttcgatacgtcgaactggtttttcaacacgatacccataggagcagcgaggttggtaacaaatgaaatcataccgaaaaggaaaatcatcgtaatgattgcaatgatttttccattctttttttcttgtgtcatggttcaaaaaaaatgttagtttataaaattaggttagttattttttagttgttattcttctacatcaaatttgtaaactgtgatttgttggtattcatcacccggcagcagggtagccgacgggaaatgcggtttgttcggagtatccgggaaacattgtgcttcaaaacagatagcgcttcttgccgggaatgtagcgccgtgtgcgccttcgaatccgttcagccagttgcctgtataaagttgcacgcctgcttcggtagtgtatacttccatgatacggccgctctcaggatctttgcaggtagcggcgaggtcgagcgaaccgctttctgttttgttcaatacgtagcagtggtcgtatccggcaccgaatatcaattgctggaatttatcgtcgatacgttcgcctacggtatgcggagtgcggaagtccataggagttccttccactttggcgatttctccggttgggatagaaacttcatcgataggtgtatagaaatcagcgttgatagtaacgatgttgttgttgacggtaggagtcggattggagatgccggcgaggttgaagaaaccgtggttagtgaggtttacaaccgttgctttgtcagtagtggcgcggtattcgatagtcagtgcattcacttcattttccagtcggtaggtcatttctacttccagattaccggggaatccctcttcgccgtcggcagaaacataattgaactgcacggtgctttcatcaatctggatagcgtcccatacacgggcgtggaaaccggtaggtcctccgtgcaaggagttagggccgttgttgattgtgagttcatgttcttcgccgaacaaagtgaattttcctttggcgatacggttgccataacgtccgatagttgtactcaggaaaggttccgggctgttgattacatggtcaatgctgtcgtgcccgagaatcacattagcatacttaccgtttttgtccggtaccataatcgaaagaatggcgcacccgtaattcgttacggccacttccattccctttttgtttttaaggataaataaatctgtttttttatcatttatatccttttgaaaatctttccggctgagccctgaaagatttccctctgttgggaatgtgttattcatgtctggtattattaaaattttcctgcaaataaaggcaaattctttcttactcacaaattattcggactaaatatagcaggtgctttaggaaagtttagcgttattactttaatgttcctattctttttggtatgttttttttcaaaaagatttttatcgtccttttcttaaaactaaactattttttgtatgtttgctcccggattcatgcaatccgagcgaatttaatctaagtttataacaagaaaaacaaaaatgtatccattaaaattcgaaccaattctgaagcagacgctttgggggggcgacaaaattattccgttcaagcatttgaattcagacttgaaaggagtaggagaaagctgggagatttccggcgttgaggacaatgaatccgtagtggccaatggcccggataaaggtttaacccttgccgacatggtgagaaggtatcgcgaggaactggtaggtgaagcgaattatgcccgtttcggaaacaaatttccattactcattaagtttattgatgccaagcaggatttgtccattcaggtacacccggccgatgaccttgcgaaaaaacgtcacaactcaatgggtaaaacagaaatgtggtatgtggtagatgctgacaaaggagctaaattgcgttcgggattttctgaacagattactccgaaagaatataaagaacgcgtattgaacaatatgattaccgatgtgctgcaagagtacgagattcatccgggagatgttttcttccttcctgcgggacgtgtacacagcattggtgcgggggcgttcatcgctgaaattcagcaaacttccgacatcacttaccgtatctacgacttcaaccgtaaagatgcgaacggcaaaacacgtgaactccacaccgatttggcccgtgaagctatcaactacgaagtattggatgattatcgtaccaaatacgaaccgttgaaggatgaaccggtagagttggttgcctgcccttatttcaccacttctttgtatgacatgaccgaagaaatcagttgtgactattcggaactcgattcattcgtcatttttatttgcatggaaggctcatgcaaaatggtggacaatgaaggcaacgaactgacagtaaatgccggagagtctattttgctccccgctaccactcaggatattactattactcctgaaagtgcaaacgtgaagttgctggagacttacgtataaaaggatatttcagcttcattgagatgaagttgttacttcgacaagcataaggcttccacgggttggaagccttttttataatatctcatatttcggaagaattttagaaagctgtgcttcatgactgctaaagcatagctttacaatctctaaagctgtgctttagcagttaaataacgccgctttattttgcagacataaatacagtaaatacaccttttcaggcttttccacatacacacacacgcatgtatataataatgagttcttcttcaaattaccactaaatttgaagaagaacctaataatgtaatttaaagttcagtttccaaaatacttatgtcaagtatctattttctataatagctaaaaattcggaataacttgtttgaagggtaatagacaacggttgttatgagtttccgccgttttattcgttttttctatattactataacatgtgtgcgtgtgtaggggaaggcctgaaaaagtgtacttactgtactcgctcacattgaaatgtgttactgaagtatatacttctacttaatgagaagatcgaattatcttaaattcctgaaatacgtgcgcaccttcctcataactttgacccccaacatcacaccgtcgaatatagccatgcccgtattgaatgaacgcatgatagcatctgccttgttgttagctggagcaatgggggcaaatatctcgcgtgttgtggctgtcattgcttttttctgggcatgtatctcattcaaaagcttctttttgcgtagggatatttcttctaatgtgaatttctgtggtgtttgcgcactcataatttatttatttgaatcagttaaaaataaattggcaaggaagttcaccataggagatatgatgagttgcttgcggaaaataataacaagagcgatgagcagaacgttgatgcctgctataatggcaaaacttgccatgaggccgcctaccaatggttctaatacataagccagagcaaaaagcaggtaaaacagggctaccatgcctaagatgataagtactaataccatgattaacgttgaaaacaggatagtcagtttttccgttaactctaatttggtgtattctttttgaagttctaaatatttcttgaactcgaaaaataactgctgaaaattctcaatacttttatcgtctgcaaacatggtcgctctgttttaaatccttggttactcacttactctgctatttctcctttcatttcggctgcaatctcgtccacgagattttccatttcactacggttgagcttaatcccttttttacgaagaatctcggcgatcttgtgacgggtatcttctcctttttcaggagcaaatagaataccaagggctgcgcctacggctgcaccacccaaaaaagctgctaaaacattcaatcctttcataatgtataatgtttaaaatgattatgatacaacaaatataacatttttcttctaaggttgttcagtaaaactaaaaaaaagtgcatagttttatatttctttttttcttttatggtttaatcttatttaacggactttggagactaaccaatggaagttaaggcgtacttttgtcattcagtatttataatttaaacataatggaaataaaaactgttttaattactggcgcaactagcggaattggtaaagcttgtgcctgtaagtttgccaaagaaggttggaatttgattttgaatgcccgtgatacttcaaagttggagaagctgatatatgagttggaaatggagtgtcctaaactggtgacaaggccgcttatttgtgatgtacgtgaccgtgaacaggtgaaggctgcactggaaaacttgccggcggactggaaaacgattgatctgttgattaacaatgccggactggtgatcggagtggataaagagttcgagggtagtctggacgagtgggacatcatgattgacacgaatataaagggattgttgacgatgacgcgtcttgtggttcccggtatgatagagcgcgggcgggggcatgtgatcaatatcggttctattgcaggtgatgcggcttaccccgggggaagtgtgtactgtgcgactaaggctgctgtaaaggccctttcggacggacttcggattgatctggtggatactccgctgagagtgacgaatatcaaaccgggtatggtggaaaccaacttctcggtggtgcgttaccggggtgacaagcaggcggctgataatttctacaaaggaattcgcccgttgaccggagaggatgtggctgagacagtttacttcgctgcttcggctcccgaacatattcagattgcggaagtgcttttaatgccgactaatcaggcaacaggaacgatttcttataagaaaaagtccgaataagcgttttttcgccggatttctttgccggatgataaaatttctattattttgttgcccgaaactgaatattgatagacgagaacatgaattattaattaaaacagagtataggaatatgagaaaattggtcgtattaggaatgggagtgtgcttggtgcttgcttttgcatcttgtaaatccagcgaaagcgcctataagaaggcttacgagaaagcaaaacagcaagaactggcagaaccgcaagtggaagctccggttgaggtgactccggtagtggcagctcctgtgacaacacctaaagtagcagatacatcgggtgtacgtcaggaaaaggtgacagttgtttccggtaatgacggtttgaaagattatagtgtagtggccggtagctttggtgtaaaagcaaatgccgaaggattgaaagattggctggatgcacaaggttatcaggctacaatcgcatttaacgctgataaggcaatgtatcgtgtaatagttagctcatttgctgataaggctgctgctgctgacgctcgcgatgctttcaaggctaagtatccgaatcgttcggatttccaaggcgcttggttgctgtatcgtgtatattgatttctttttggtaatatatattgggaagaaccaacgttttttccgaataagaaggcggtaactgggaagttactgcttttttgttgagagagaaaatgatgtttcgtttagatatttttatcattctactaaaagaagttataaatgtaggtggggaaacttttatagcaaagaaagtttttacttttgtcaactcttaatttagaggatttacagccttgatattagtgaggtgttaataaaggaattaaatggaacaaaaatatgtaatggctgctatcgatgcagcattgaaagccggtgaaaacatactttctatttatgatgatccggcatcggacttcgagatagagagaaaggctgataattctcctctgacaatagcagacaggaaagcgcacgaagcgattgtggctattttgaacgatactccttttcctgttcttagtgaagaaggaaagcatctggattatgaggttcgccgcaaatgggatactttgtggattgttgaccctctggatggaacaaaggaatttattaaacgcaatggagaatttacggtaaatatagccctggtgcagaattcagtacctgtgttaggcgttatttatgtgcctgtaaagagagtgctttactttgctgtggaaggtataggagcctataagtgctccggtattgtcgctccggtaggggaagggacgacattacaacagatgataaaagagtcggagctgatgcctttagaggatgtacgtgatcattttattgttgttgcttcacgttcgcacctgtcacctgaaacggaaacatatatcgctgacttgaagaagaaacatggcagtgtcgaactgatatcaagtggaagttccattaaaatctgtctggttgcagaaggtagtgcggatgtgtatccgcgtttcgctccgacaatggagtgggatacagctgccggacatgcgatagcgcgtgccgccggaatggaagtgtatcaagccggaaaggacgaacctctacgatataacaaggaggatttattgaatccgtggtttatcgtcgagccaaaaagaaaacactaattaatgtttatatgacatttgaaattgtatttgtactgttgtcgttattaggaatggtagctgctttggtcgctgacaaaatgcgtccgggcatgatacttttttcggtagtggtcttgtttttgtgtgccggtattctgaccccgaaagaaatgctggaagggttcagtaataagggcatgattaccgttgccctactgtttctggtaagtgaaggtatccgccaatcgggtacattagggcaagtgataaagaaattgcttccacagggcaagacgtcggtgtttaaagcacagttgcgtatcttaccttcggtggctttcatttccgctttcctgaataatactcctgttgtggttatcttcgccccgattatcaaacattgggcgaaatcggttaatctcccggcaacaaaattcctgattcctctttcttatgtgactattcttggtggtatttgtacgttgattggtacttctaccaatctggtagtgcacggaatgattttagaagccggttttgaaggtttctccatgttcgaactgggaaaggtcggcatttttattgctgttgccggaattgtttatcttttccttttctccaaacgacttttgccggatgctcgtcctgatacggctgtgccggatgaggaaatggaagagggggagaaattgcatcgggtggaagcggtgttaggggcacgtttccccggtatcaataagaagttgagtgattttaatttccagcgtcattatggagcggaagtaaaggagatcaagacacgtagcggacagcggttcgtaactaatctgaatgaagtggtgctacgtgaaggagatacgcttgttgtaatggctgatgatacctttattcctacatggggggagtcttctgtgtttgtgttgctgacaaacggaaatgaccctgataccgcaggaaagaaaaaacgctggctagctctgattttattggtgctgatgattgtcggtgctacgatcggtgaattgccggtgacaaaagagatgtttccggatatcaaactggatatgttcttttttgtgtctatcaccaccattgttatggcgtggacgaacctgtttcctgcccgtaaatatacaaaatacatttcgtgggatatcttgattacgattgcttgtgcatttgcaatcagtaaggctatggtgaattcgggagtggctgatagtgttgcgaagttcattatcgggttgagcgatgattacggtccgcacgtgttgcttgccatgttgtttatcattacgaacctgtttacggagttgattacgaataatgcggcggcagcattggcattcccattggccctgtcgattgcagcgcagttgggagtcagtccgacgcctttctttgttgtgatctgtatggctgcttcagccagtttctctacacctatcggttatcagactaatctgattgtgcaaggtatcggcaactataaatttatggactttgttcgtatcggtttgccgctcaatatcataacctttataatctctgttattctgattccgatgatctggaacttttaataaaacgaatttataaatggaagaaaagaatcatatatatcctatatttgaccgcatgatgacacggcaggacaaagaggaacttttggggcaacatagtgtgatgatctggtttaccggattgagcggatcgggcaaaagtacgattgctatcgcactggagcgtgaacttcataagcgaggattgctttgccgtatccttgacggggataatattcgtagtggtatcaataataacctcggattttccgaaactgaccgggtggagaatatccgccgcatagctgaggtttcaaagctctttttggatagtggcattattacaattgcggcattcatcagtcctaataacgatatccgggaaatggctgcaaatattatcggtaaggatgactttctggagatttttgtgagtaccccgttggaggagtgcgagaaacgagatgtgaaagggctttatgccaaggcacgtaagggggaaattcggaattttaccggaatttctgcaccgtttgaggttcccgaacatccggcattgtcattggatacttccaaactgacactggaagaatcggtgaattgcttgttggagctggttttgcccaaagtaaaaagaagtgtttagtagaagaataaaatcattattttagtaatggaagaatataaattaagccacttgaaagaactcgaagccgagtctattcatatcatccgcgaagtggcggcggaatttgagaatccggtgatgctttatagtattggaaaggattcttctgtaatggtacgcttggctgaaaaagcgttttatccgggtaaagtaccattcccgttgatgcatattgattcgaaatggaaattcaaggagatgattcagttccgtgatgagtatgcgaagaaatatggatggaacctgatcgtagaaagtaatatggaggcttttcatgcaggggtaggaccttttacacatggaagtaaagtgcatacggacttgatgaaaacacaggcgttgcttcatgcactggataagtataagtttgacgctgcttttggcggtgcacgccgtgatgaggaaaaatcgcgtgcgaaagaacgtatcttctctttccgggataagtttcaccagtgggacccgaaaaatcaacgtccggaattgtgggatatttataatgcccgcgtacataaaggagaaagtatccgtgtgttcccgttgagcaactggacggaattggatatatggcagtatatccgtttggagaatattccgattgttccgttatattatgcgaaagaacgtccggtggtgcaaatggatggcaacctgataatggcggatgatgatcgtctgccggaaaaatatcgcgaccggattgaaatgaagatggttcgcttccgtacattaggttgttggccgctgacgggtgctgtggaaagtggtgccgctacgattgaagaaatcgtggaggagatgatgactactaccaagagtgaacggacgactcgtgtgattgactttgatcaggacgcgagtatggaacagaagaaacgtgaaggatacttttaattgtaattagtgatggcagataataaattagatataaaggcttttttggacaaagatgaacagaaagacttgctgaggctgttgacagccggttcggtggatgatggaaaatcgacattgatcggtcgcttgctgtttgacagcaagaaattgtatgaggaccaattggatgcgctggaacgcgacagtaaacgtgtaggaaatgcaggtgagcatatcgactatgcattgctgctcgatggattgaaggctgaacgcgaacaaggtattacaattgatgtggcttatcgctacttctccaccaatggacgtaaatttatcattgcggacactccgggacatgagcagtacacccgtaatatgattaccggcggctctacggcaaatctggcaattattctggtggatgcacgcacaggagtgattacacagactcgccgccatactttcctggtgtctttactgggtatcaaacatgtggtattggcggtcaataaaatggacttggtggatttttcggaagagcgtttcaatgagattgttgcggagtataagaaatttgtatctccactgggaatccctgatgtaaactgtattccgctttctgcgttggacggtgataatgtagtggataagtcggagcgtactccgtggtacaaggggacttctttacttgatttccttgaaactgttcatattgacaatgaccataatttggaggattttcgtttcccggtgcagtatgtgctgcgtccgaatttggattttagaggtttttgtggtaaggtggcttcgggtattgttcgtaagggggatacggtaatggcgttgccttcaggaaagacgtccaaagtgaagagtatcgtgacttatgacggtgagttggactatgctttccctccacagtcggttacactgacactggaagatgaaattgatgtatcccgtggtgaaatgctggtacatcccgataacttgccgattgttgaccgtaactttgaagcaatgttggtatggatggatgaggagccaatggatataaataaatcgttctttatcaaacagacaacaaatctgagtcgtacgcgcattgatacgattaagtataaggtggatgtgaacacaatggaacatctgtcgccggacaatggacagttgacaaaagagactctgcctttgcaattgaatcagattgcctgcgtggtgctgacaaccgcgaaagagttgttctttgatccttataagaagaataaatcatgtggctcatttatcctgatcgacccgattaccaacaatacttctgcggtaggtatgattatcgatcgggtggaaatgaaggatatgagcaatacggatgatattcctgtattggatctgtcgaagttgggaatcgcccccgaacattatgaagcagtagaaaaggcggtgaaagaactggaacgccagggttttgccgtgaaaataataaaataagaaagtatgggattactcgaatttaataaacttccgatcaatacattggtaggtgccgactggaaaacttttaaagcaattactgccggtcgtgaaattgatgcagcctataagggtaagtaccgattgacaaaggctgtatgccgattgctttctccattggcctcattgcaggacaaacgttatgagaagttgttggcgaatcaaccgctggagcatgatccggtgtttattttggggcactggcggagcggaactacttttgtgcacaatgtattctcctgtgataagcattttggctataatacgacctatcagaccgtgtttcctcatttgatgatgtggggacagcctttcttcaagaagaatatgagttggctgatgccggataaacgtccgacggacaacatggagctggcagtagacctgccgcaggaagaagaatttgcactggcaaacatgatgccttatacttattataatttttggttcttgccgaaatatcaacaggaatatgctgacaagtatctgttgtttgacaatatctcggatgcggagttgaaggtgtttgaagaagtatttacgaagctgataaagatttcgttgtggaatactcatggcacgcaattccttagcaagaatccgcctcataccggtagagtgagggaactggtgaaaatgttcccgaatgctaagtttatttatctgatgcgcaatccgtatacggtatttgaatctacacgcagtttctttacaaatacgatccaaccgttaaaattgcaggatatcggaaatgaacaattagaggaaaatatcctttctatctatgcgaaactctatcataaatatgaatcggacaagcagtttattcctgagggtaatctgagggaagtgaagtttgaggatttcgaagccgatgcaatgggaatgacggaggatatttataagtcactctctattcccggatttgccgaagcgcgtggagatattgaaaaatatgtcggcggtaagaaaggatataaaaagaataaatataaatatgatgaccggacaattcgattggtagaagaaaactggggttttgctttgaaacaatgggattataatttataaaagaaaggaaaggtattaatgattcagaaaatcgttcatcgcctggtggtgacaacttttgtcgcatttatttcttccttgtctttgctggcacagcataaagtggaaatgtttccttttggagatatggaccaatgggtagaccggcagataaaggaatcgggaattatcggaggaaatacgaagaatgtgtatgagattgcaccgacggctgtaattcaaggagatcaggtttataaaaacatgggtggttcaccgtggggtacttcgaatgtaatggcaaaggtagcgggaattacaaaaacaaatacgtctgttttcccggaaaaaaggggagaagggtattgtgcacgtctggatacacgcatggaaagtgtgaaagtgttggggcttgttaatatcactgtgttggcggcaggttctatttttacagggacggtgcatgaacctattaagggtactaagaatccgcagaagatgttgcaatgtggcgtgccgtttactaaaaaaccggtggcacttcaatttgattataaagtgaagatgtcggacagggagaatcgtatccgtgctaccggtttcagtaagattacggatgtgcccggaaaagattatccggcagctattctgtttttgcaaaaacgttgggaagatgcgaacggaaatgtttatgccaaacggatagggactatggtgacttattattatcattctaccgactggaaaaataatgcttcgtatgagattatgtatggtgatattacagggcgccctgaatataaagcgcatatgatgcgattacaagttaccgaaaactatacggtaaacagtaaaggggaaagcgttcctattcatgaagttgcctggggaaatgaagatgatgtgcctacacatatatatatacagtttacgtccagtcatggaggagcctatatcggttcgccgggtaattcattatgggttgataatgtgaaactggtttattagatataatattaaagaaataaaatagctggtgatgcaattatcgccggctatttttttgttttaattctttggtaataaatgcctttcgtcttctttcggagttatataacacttttatcattccttatttttttgtgtgggaatgattttttacgcgtttttttgcttgtgttatattaaatatctatatttgcattaaatttcaagaaaaggaagttgcttattgtctctttgtcaggcatgagacgtttgggagtcggttgatttcctgtaagacaaaatatagaaatatattatttactaaaataaattgagatgaaaaagggtttattgtttattttattggcagcggcctctgtatgtctgcctgctcaggaaaaagaaaatgcagcgaagagctataccgtagaaacaaatcgcttcggtgctaactggtttattagtggtggtattggcgcacaaatgtattttggcgacaatgacggtaaagctgatttcggaaaacgtcttgctccggcacttgatattgccgtaggtaagtggtttactccgggaatcggattgcgtcttgcatacaatggtcttcaagctaagggagcagctccttctgctgacgctaggtatgcaaaaggtggtacatattctaacggatattacaaacagaaatggaatatggctaatttccatggtgatgttctgttcaacctttctaacatgttgtgcggatacaatgaagatcgtatttattcatttattccttatgtaggagctggtttggctgtgtcatggtcagaacctcgtgagaagaatttgggtataaatgccggtttgatcaaccgtttccgcttgtctcctgctttagaccttaatgtagaattgcgtggccttttgatgaaaaatgcatttggtggcgctagcaaagaaggaatgggtggcgtgacagtaggtgttacttataagttcaagaaacgcggctggaatgctgttcctactgtaccaatggttccggaaagccagttgaatgacatgagagacagagtaaatgctttgaaaggtgaaaacgaatctctgaaacgtgacttggttgaagcacgtaacaagaaaccggaagttatcgttaagaaagaaggcggatttgttccacgtcttgttgttgtattcaacatcggaaagagcaatatcagcaagagagaatacatgaatatcgaagctatggctaagggtatcaaggctaatcctgacaagacatttactgtaacaggatatgctgacaagggtactggttctgctgaatacaacatgaagttgagtaagaagagagctgaagctgttcgcgacctgatggttaacgaattcggagttcctgcttctcagttgaaggttgactacaagggtggtgtaggcaatatgttctatgatgacgctaaactgagccgtgtagctattgttgaagaataatatacatctaaataatagaataaaagagacgtttcctttcataggaagcgtctttttttgtatttttgtgccccatgagcaggatagtagcaatagattatggaagaaagcgtacggggatagctgtcagcgatacgatgcagttgattgccaatggcctgacaacagtgccgacgcatgaacttctgaattttatcggtgattatatcgcaaaagagccggtagaacggatcattgtcggtttacccaggcaaatgaacaatgagttttcggaaaatatgaaaaacatagaaccctttgttcgttcattgaaaaaacgcttcccggatattccggttgaatatgtggatgaacgttttacatcggttctggcgcatcgcacaatgcaggaagcagggctgaagaaaaaagatcgccagaataaagcgttggtggatgaaataagtgcgactattattttgcaaacatatttggagagtaaacgtttttagtagaagaacatagaataacttaatttttagtagagtataaaaatatgattttacctatttatgtatatggccagcctgtattgagaaaggtggcagaggacattaccccggattatccgaatctgaaagaattgatagcgaacatgtttgaaacaatggtgcatgccgatggcgtaggattggctgctccgcagatcggtttgcccattcgtgtggttacgattacattggacccgctttcagaagattatccggaatttaaaggttttaataaagcttatattaatcctcatattttggaaataggaggtgaggaagtgagtatggaagaaggctgcctgagtcttcccggtattcatgagaccgtgaaaagaggaaataaaattcgtgtgaaatatatggacgaggattttgtggagcatgaagaagaagtggaaggttatctggcacgtgtgatgcaacatgaattcgaccatttggacggtaaaatgtttatcgaccatatctctgcacttcgtaaacaaatgataaaaggcaaattgaatacgatgttgaaagggaaagcacgtagttcctataagatgaaacaggtgaaataaagataaaaaacgtttatatccctgttaagtaagcgaaaagcattatttttgcttcgtttacaagtataaaatgtcgatgattaaaaaaatactaacagttttaatgctgttccccacattggtgtgtgctcagataaatacggaccgggtgatgaccatagcccggaacgctctttattttgaggactatgtactttctatccagtactttaaccaggtaattaatgctaagccttatctgtatgaaccttatttcttcagagcactggccaagctgaatctggaagattttcagggagcggaggcggattgtgacgcggctattcaacgtaatccgtttgtggttggtgcttatcagattcgtggtctggcgagaatccggcagagtaaatttgacggtgctattgaagactatcagaaagcgctgcattatgatccggagaacattactttgtggcataatctgacattatcacatattcagaagaaagattatgattcggcaaaagaagatttggagagtttgctgaaagtatctccgcgttatactcgcgcttacctgatgagaggagaggtctctttacagcaaaaagacactattgccgcattgaatgatttcaataaagctcttgaactggataaatacgatccggacgcatgggcagcaagagcgatcgtcaagttgcaacagtcaaaatacggggaagcggaatctgatttcgatcgtgctattcatttgagtgctaagaatgccgggaattatattaatcgcgcattggccagatttcatcagaataacctgaggggagccatgagcgattatgacttggcattggatattgatccgaataattttatcgggcactataaccgtggtttgttgcgtgcaagggtaggagatgataaccgtgctattgaagatttcgactttgttataaaaatggagccggataatatgatggcaatctttaatcgtggtctgcttcgtgcacagacgggagattatcgtggagctatacaggattattcaactgttatcaaccaacacccgaatttccttgccggatattatcagcgtgctgaagcccgaaagaaaataggggaccggaagggtgctgaacaggatgaatttaaactcttgaaggctcaactggataaacagaacggagtgacgaataaagatgtagcccaaaaccagaatccggatcaggacagtgaaggggatgataaagatagaacccgtaagaaatcagataagaatatgaataactatcggaagatagtgatagctgatgattctgaagctgaacagcgctatacaagtgattatcgtggacgtgtgcaggataagaatgtgaatattacactggagcctatgttcgctttgacttattatgagaagatgagtgatgtgaaacggtcggtgaatttccacaaatatgtggaagaactgaatcgctcgggtgtacttccaaagcgtcttcgtattacgaatatggaagctccgttgacagaagaacaagtgaaattccattttgctttgattgatacgcatacatcagctatcgtggatgatgagaagaatgcttcaaaacgttttgcccgtgcaattgatttttatttggtacaggatttctcaagtgcggtttccgatttgacacagacaatcttgttggacggtgatttcttccctgcatattttatgcgtgcgcttatccgttgcaagcagttggaatatcagaaggctgaacaaactgccgatacagatgttcctggtgataatgcacgtaaagagataactgcggtagattatgaggtggtaagaaaagatttggataaggtgattaatcttgctccggattttgtttatgcatattataatcgtgccaatgtgtctgccatgctgaaggattatcggtcggctattgcagattataataaggctattgaactgaatcctgattttgctgacgcttatttcaaccgcggacttactcatatcttcttgggtaataataaactgggtatttctgatttgagcaaagccggagaattgggtatcgtttccgcttataatgtaatcaaacgttttacagatcaaacggaataacatttttttgataaaaaatagaaaactcaaaagatttagttacttttgcgttcaaattgtgaaaatataacataatcatattatgataaagataacatttcccgatggctctgttcgtgagtacaacgaaggagtaaacggtttacagattgctgaaagtatcagctcgcgcttggcacaggatgtactggcatgtggcgtgaacggcgagacttatgatttaggacgtcctattaatgaagatgctgattttgtactttataaatgggatgatgaagaaggtaaacatgcattctggcacacaagtgctcacttgttggccgaagcattacaggaactttatccgggcatccagttcggtatcggaccggctatcgaaaatggattctactatgatgtggatccgggagaagcggtgattaaggaaagcgatcttcctgctattgaagctaaaatgttagaactgtctgcaaagaaagaggcggttgttagaaaaagcattgcaaaaacggatgctttgaaaatgtttggcgaccgtggcgaaacatataaatgtgaattgatttccgagttggaagacggtcatatcactacttatacacaaggtgcatttactgacctttgccgtggccctcacttgatgacgactgctccgattaaggctatcaagttgacttcggtagcgggtgcttattggcgtggacatgaagaccgcaagatgctgactcgtatttatggcatcacattcccgaaaaagaaaatgctggatgagtatctggcattactggaagaagccaagaaacgcgaccaccgtaagattggtaaggaaatgcaattgttcatgttctctgaaacggtaggtaaggggctcccgatgtggctcccgaagggtactgcattgcgtttgcgtctgcaagatttcttacgtcgcattcagactcgttatgactatcaggaagtaataactccaccgattggtaataagctattgtatgtgacatccggccactatgctaaatatggtaaggatgcattccagcctatccatactccggaagaaggtgaggaatatttcctgaaaccgatgaactgcccgcatcactgcgagatttataagaacttcccgcgctcttacaaggatcttccgttgcgtattgctgaatttggtactgtttgccgttatgagcagagtggtgagttgcatggattgactcgtgtgcgtagttttacacaggatgatgcgcatattttctgccgtccggaccaggtgaaagatgaattcctccgtgtgatggatattatctctattgtattccgttctatgaacttccagaattttgaagctcagatatcactgcgtgataaagtgaaccgtgagaaatatatcggtagcgatgataattgggagaaggcggaacaagctattattgaagcttgtgaagaaaaaggattacctgctaagattgaatatggtgaagctgctttctatggccctaagctcgactttatggtaaaagatgcgattgggcgtcgttggcagttagggactattcaggtagattataacttgccggaacgcttcgaactggaatatatgggttctgataaccagaagcaccgtccggttatgattcatcgcgctccgtttggctctatggaacgtttcgttgctgtattgattgagcatactgccggtaagttcccgttgtggctgactcctgaacaggtagttattctgccgattagtgaaaagttcaacgattatgcagagcaggtaaagatgtatttgaaaacacacgagattcgcgcgattgtagatgatcgtaatgagaaaatcgggcgtaagatccgtgataatgagatgaaacgcatcccttatatgctgattgtaggcgaaaaagaagcagaaaacggagaagtttctgttcgtagacagggcgaaggtgacaagggaaccatgaaatttgaagaatttgctaaaattttgaacgaagaagttcagaatatgataaataaatggtaactttgcagccgtttcatgataaatatttagtagaacaataaaaagatcaaactaggaagtaaacgtttttaatgaagaatgacactctaaaagggcaatacagaatcaacgaacagattcgtgccaaagaagtccgcattgtgggcgacgatattgaaccaaaagtatatcctatctttcaggccttgaaactggctgaagagaaagagttggatttagtggaaatttctcctaatgctcaaccccctgtttgtcgtgttattgattattctaaatttctttatcagttaaagaaacgtcagaaggaacagaaagcgaagcaggtgaaggtcaatgtaaaggaaatccgtttcggacctcagacagatgaccatgattataacttcaagttgaagcatgccaagggatttttggaagacggagataaggtaaaagcatacgtgttcttcaagggccgttctattctttttaaggaacaaggtgaagttttgctacttcgttttgccaatgacttggaagattatgcgaaagtagatcaaatgccggtactcgaaggaaagcgtatgactattcagctttcaccgaaaaagaaagaagctccgaaaaagcctgttgttgcgaaacctgctgctcctgcacagaaagcggaaatgccgaaaacggacgcggaataagaaaaggtgcgtaacgcgcaggtatagtgcgttaccattatatatttaataatttaaaaacaagtaagatgccaaagatgaagactaactccggttctaaaaaaaggtttacccttaccggaacaggtaaaatcaaaagaaagcacgcttttcacagtcacattttgactaagaaaaccaaaaagagaaaaagaaatctgtgctactctacaactgttgatacaacaaatgtaagccaggttaaggaactcttagcaatgaagtaatcaaaagcgtacaaagtattattaaagtattaaccgaatgcattagcttgaagttcgctgcgtgaagtagcggcgctaacattcaaaaacagtaaaactatgccaagatcagtaaatcatgttgcttcaaaagcaagaagaaagaaaattttgaaattgaccagaggttactttggtgcaagaaagaatgtatggaccgtagctaaaaacacttgggaaaagggtttgacttacgcgttccgtgaccgtagaaataagaaaagaaacttccgcgctctttggatacaacgtatcaacgctgctgcacgtcttgaaggaatgtcttattctaaattgatgggcggtctgcacaaagccggtatcgaaataaaccgtaaggttttggctgatttagcgatgaatcacccggaagctttcaaagctgtagttgcaaaagcaaaagctgcttaagtttcaacagtttatgatttacaaaatgtcagttacttaaccggtaactgacatttttcttttgttaggcagataaaagggaatgaaaaaaatgttagtaggcaaacaaaatccttttttttcttgctattctccgggattcttattatatttgtgatacaaaaatattagccgtatcgactggatcgggaaactcttcaaattaatctgatataccgagaaagcttcgatcttcaatggcgggccacatccttcgggacagctttaagccggtggattacaaaggggacgggcactcaaatcttgttctatcagagtttcatcacatcgtcggtacggcttttttatatactctcctatgatattttatttctccggtacaggtaactctgaatggattgcaaatcagctctctaaaggacaaaatgaagatttggtctttatccctgaggcattgaaaaatgaggcgctggagttcgatttgcagaaagatgaaaagattggttttgtgtttccgatttactcatgggctcctcctgaaattgtactgcgctttatcaatcgaatttctttgaaagaataccagaatcagtatttgttttttgtttgttcttgtggggatgatacgggacttactcaacaagtgttggtgaaagcgttgaatgataaggggttgctgtgtcatgccggtttttctgttactatgcccaataattatgtgttgcttcccggttttgatgtggatactaaggagttggagaggattaagttggcaaatgcagttccacggcttactgaaataaatgcattgataagcaggagagagaagattttttcttgtcacgaaggaagcctgccttttctaaaaacgagaattataaatcctttgtttaatcgttttcaaatgtctcctaaacatttttatgcaacagatagttgtatctcatgtaagcgttgcgagaaggtttgtccggtagataatgtgaaacttcgggaggggagacctgtttggggaaagaattgcacctcttgcttggcgtgttatcacgtttgccctcagcaagcggtgcaatatgggaaaagaacgagaaacaaagggcaatatttcaaccctgataaatctattcgtctttgattttaatgcaacagtttgacaagtcctcgatgatagccaggctttctactctaacgccttgttcttccagtactttacggccgttttgaaaggctttttcgataataaagcccattcctactagatttgctccggattgtttgatgaggtcgagaatacccaatgcagcgttcccgtatgcgaggaagtcatctacgaagagaacattgtcatcgggagtgagaaaatcagaactgataacgacttcataatcacggtctttagtgaatgaatgtacaattgtgcttaatgcattctggattgttttgggtgatttcttcttggcaaacacgactggcaagtccattagataacctgtcataatagccggggcgataccgctggcttcaattgtcatgattttatttacgtttgtagctgcaaaacggcggacaaactcaaccccgattgatttcatcaggacggggtccatttgatgattgatgaaaccgtctactttaaggatacctccttcgtagcattttccgtcttgcaggattctttttttaagtaattgcatactatatatgatgttaattaataatgtgctaatattccattccgcatgataaagaaagcggtagtggtatattagcacatatacagtttaaatagttacttattgtctcttaagtctttcacccggacggcttttccttcactttgcggaagggagccctttttcactagtttcactttgggcgtcactagtatttcgtctttcaactgacgggtaatatccttgcggattttttccagttctatatagttatctgtcgaaagatcacttagttcaacttcgacaatcatttcatcctgattgtttacggtttcgagcgtaatcagataattgctacctaattcggggaaccgtaccagaattttctcgacttgcatcgggaagatattaactcccttaatgataaacatatcgtcactacgtcctttgatacggtcgatacgaatgtgtgtacggccgcacggacacttgccgggaagaatccgcgttaaatcccgtgtgcgatagcgaattaacggcatcatctcacgatcaagggttgtaagtaccagttcgccgatttctccttcagggacaggctcgcaggtttcggggtcaatgatttctaccaggtagcaatcttcccaaaagtgcattccgttttgttcctggcattcgaaagcgacaccgggaccgttcatctctgtcatgccgaaactgttgtatgctttcacacctaacattcgttctattttacgacgctgttcatcagtgtggggttcggcgccgataacgagtgttttcaatgttgttcccttggggtcgagtccttcttcttgaaagacttcagccaagcggattgcatagctggggattgcatgcagggcagtagtcttgaagtcgttgatgaacttgatctggcgtttgctatttccggctgccgcagggactgttagacatccgagtcgttcggcgccatattggaaacctagtccgcctgtgaacataccatatcctgaactgttttggaagacatctgttttacgaattcctacggtatatagacagcgggctaccaaattagcccacgaatcaagatcgtgctgtgaatgaacaatgacggttggatttccggttgtaccactggaagagtggatacgtacaccgtcattctgcatatcaccggctactaacccaaaaggatagttagcgcgcatatctgcctttgtagtaaaaggaattttacggatatcatccaaggactgtatattgtcagcagtaatgttatgcttgctaaaaacttccttataataaggtgcgttagcggctatgttgattgttttcttgagccgttgaagttgcagttcctgcaacttctcgcggctcatggtttctatttcttcttcccagtactgtgtattcatggtagtgacaattattacattagtttttctgcaatttccttgccggcagccaatgctttaagattcatttctacaattgcttctcctttgcgcagaaagatttcacgaatgctgtcttgcactttctcgtaatcaatgccgaggaatggaattgttgctcccagtaagacaatgttggcaacgcgggcggaacctacttctttggctactttgtcaacgttcaacacaatcttatgtggcagtttgttgatttctgccattactttatcttcctccggataattgggaatgttgacaaacggagtttcattggtaaccaaccagccttcggggctgagataggggagataacgcaacccttccattggctccagtgaaatgatgagatcacattttccggaaggaattaaatccgaagcaatcggttggtcgctaatacggagattggattgaacatctccaccgcgctgactcattccgtgtacttctgcctgtttcatgtacagaccctcttttaaggcggccttaccgattactgtggcgatagacagaataccctgtccacctactcctgataatataatatcttttttcatggcttatttacttctttttttgcgtgctaatgtctggatacactctctacgtggaataatgacggatacaccacgatattcgatttcttcacgtatgatacgtttcatttcttcataattctttttcaatggaaccactacacggatatgagccggatctactccgagacctgcacatatcgcttcgatacgtccggttccggcggaatcctggccgcctgtcatagcggttgtttcattgtcagagatgacaatcgtgacattggcattttcattcacgcagtccaataatcccgtcattcctgaatgagtgaatgtagagtctccgattacagctacagccggatagagtcctccgtcggcagcacctttcgccatagtaatggatgcccccatgtctacacatgaattaatcgcattgaatggtgcattagcccctaatgtatagcagccgatatcgctgaatactttgtgagacgggtattcttctttgagaacttcggttaatgtgatgtacatatcgcgatgtccgcaaccttcgcaaagtgcgggcgggcgcatttctacaacagaaggaatgccgaattctgatttattttcttttcctactgcacgtgctacggagtctggattcagttctccgtcctgagacaatgtgccgtccaagcgtccttttactttaattccaatacccagataacctttcaactgtttttctacaaacggctgtccgtcttccagaacaagaatctcgtcgcaagattcagccaactgaaggatttgttttttaggtaatgggtactgaccaattttaagtacagggtactcacagccttcaggataattctccattaagtaattgtaaccgatgccacaggcgatgattcctaatttcttgttagggccgtctgtgtatttattgtaaggtgattcttcggaagctttgatgaattcatcctggcgtgcgagcagaactttataacgtttgcgtgcgtttcccggtaataagataaattgacggggatcgtcactgaaagatataccgttctgtggtttttgttctttgcgttctactccggagcgagagtgcgccaagcgggttaccatacgcattaaaaccggttcgcctagtttctctgaaaattcaaatccgtcatataccatatcgtatgcttcctgctggttgctgggctcatacatcggtataagggagaagtccccataaaaacggctatcttgttcgttctgagaagaatgcatgcttgggtcgtcggctgctactacaatcagtccgcctttcacgcctgtaatagcagagttgacaaaacagtcggcagctacgttcatacctacgtgcttcatacaaactaatgcccgtttaccaacgaaagacatacccaacgcagcttccatagctgttttttcattggtacaccaacggttgtgtatattctgttcggtcgttataggggccatttgaatatattccgtaatctcagttgaaggagtaccggggtaggcgtaaacacctgaaagtccggcatccagtgcagcttgtgcaatggcttcgtcgccaagtaagagttgcttgctcatatatttcttttattagtgttgatcacagtttgttattatatcgcgcaaagatagccttttcagttcgttttatcacagaattacttgaaaatctttctttcattcagtgctttccagtattttcttgcatttgccatgtggtcggcataattggaggcaaaattatgagttcctgagaaatcttctttcgcgcacatatatatatagttatgttttgtatagtttaatacgctgtctattccttttttagtaggaatgcggatgggaccggggggtaatccggtatttgtataagtattatacggtgaatttactttaagattctcgttagtgatacgtcttaaggcgaaatcttgcaaggcgaattttatggtaggatctgcctgtagaggcatatctttttgtaaacggttgatatagagacctgctaccaacggtttttcttcattattattggtctcttcttctacgatcgaagcgagtgtgcagacttcttccggagtcattccgattgccgtagcccgagctagccgttcgttgttccagaagcgttcatgctctttttgcatgcgctgaaaaaaatcgtctacgctcatatcccaatatacctggtaagtttccggaataaaaagacatggaatcgttttactgtcatatcccaacttggactgaaaggtagagtcgaatagttgacgagctatttcgatagaatctatcataagttgtttacctatactccgtgcaaggcggtctatagtccgtacacttccaatagtgagattcataggctcttgatagcctctggagaaacggctatacacatggtatacattgtcattcgggcgaatagcatagcgtccggtatgtatattctgattgaaattcttgtatttagacatccaatagaagccggtgaagttctttatatgtcctgaacgttttattttattaaatatggagtcggccgtgtcgtcccgatctacataaatatacacggttctggaggggtggaactgaggagcaaacagatagtaataaacagtgcctcctgcaatggcgcataggaaaatggctccgaccagaattgtcaataaaatctttcttttcttcatcttatgagacgttatttttttgctgtgccaaagataggaagaatttggataggagtgatttctttctgtgatgaatcgctgaaaaggaatagaatttatttagtttttctttatatttaaagagccggatcggcagattgttttggttgaattgcaatttcttattagtgccacatgtggaactaataagaaaagatatatgggttacttgctgtttaccaaacagatagttaattcggccactggtgataattggcttcggcttctattttgttttcaatttcatcaggtagagttgcaaagaaatccatgtgtgtaagtcgttcgatactgtctatggtaactacatatgagtgaagaggatctgttgcttgttcattattgaataagaaaccaatggctcgcatgggtttgacaaaaggagagaggactactttgaaaaactgttggggtactgcaactttattttttccgattgttttcgattctctttctatgataggtccgcaaataacgatgacagcgctgtctgcaatagcccagtcccggatcttttcttccagatttttccagcctcttctatttaattgcggatgttgtgggcacatattgctaaaatagaacgactctttcatcgctttcggactccatttcatatctgcagccggtgccatgtgtcctttatcatatcctgaacgtgtataatccgcatttgttgcaatagtccctattgctaatggatcggcaatgaaacggttacttcttttttcttttcctttggtttcttgtcgggtaagttcataggatacccaattcggaagttttaaatctttattataagaaacggtatatcctgtatgtcgaatgatttgctcttgtttgggagctaatgagacagggatctccaaatttctgccggaaggaatttgagaagatgtattaacttgtggttcgttgcttttttgcgtttgggtattaaactgttggcaatacaaatagacaccataaagaacaggtataagtataacaatagtgataatacatcctaatttataattagaacgtgatttctttttgaataatttcctgttttgatttcgtttcatcagatgcagttcaatattatgaaaaaagcgttaactatgatgatagttaacgctttattatcaagagccgctagccagacttgaactggcgacctacgcgttacgaatgcgttgctctaccaactgagctatagcggcggtttgtctctcgtttacggcgtgcaaaattacagctttatttgagaaaacaaaaagaatccgacaattttttagccttaaattttaaatctctcagattagcctttattgtagagcttgaaacaataatttaactttcaaacattctactgcgtgccagcatacaggctccgacaataccggctttgtcttttaatttggaggtcataatagcagaatccttatttaccaggttgagcgagtatttacgtactgctgttttgataggctgggtaatatagtcgcctgtcagtgataaggttccgcctattataactagttccggattaaagatattaattaatccggcaatctgttttcctagtttttggcctatttcttctacgatttcaatacaaagcagatcttctttatttacagaagcgataatttcatctaaagtcaaaacattgtcttttgacaaaatcctgttggataaaattgaactttctccgttctggatacgttctattaatattcgatgaagagcagagcctgatgcttcagtctccagacaaccttttttcccacaatggcagatgatttcattatcgaaaacatttgtgtgcccgaattctccggaaaatcccgatttgccggtatatattttcccgtcaataataatgccgatacccagcccccagctgacatttacaaaaataatatctttttctccttttacgcaccctttcatatattctccgtatgtcatggcgcgtgtatcattgtcaattgttactcgaaatccgattttttcagtcaacacctccgccagcggtctttcttcgaaattgaactggctgaaactatatccggattccggattgactctgccggaaacatttatattgatatttaatattttatcattatcaatatctactttctttataaattgcaagataagtttacataattcttcaagtgcttccgacgtattttctgatttgaaagggatattcatctttaactctaccatatcacctttaaagttgatcaggcctatgttaattgcaaatttcttgatatctactccaatgaagtatcctgattcgggatttaggccgtataagctaggatagcgccctccactcgtttccagtttgccgtaatcatttatatacccctcctcacacatttcactaatgaattttgtgacagttgggacactaagatctagctcctttgctaaatccgtaatagttgaactaccattatatatataatgtgtgataatcttcttcttaagaagagcgtttttagtccctacttctatttctttcagtaaatgttgtttcatcttagttcttctttattctttctcgcaaagataataaatttatttattaatggagatttcttgtctttgaatttattatattctcaatttctgatattttttcgtcggaaataataataaagggcttttgagtgtcaggtttaatataataaatatttttattaataataaaccgaatattaaatataagacttatatttgtgcgattattgtttaattataaatgaaaggaaaaatatgattgtatctaatctgcaaaatagtcagcggattgaaggacttcaccctttgtttaagtctttgtttgactatgtgaaaacacatgatttgcttcatgccgatttggggcgtattgaggttgatggtgatcatctatttattaataatgtgaatccggagtgcgtaacttctgatcagcaggttttagaattgcatcatgactatattgatgtacatatcttgttggagggtgaggaaatgattggttggaaagctttagaagatttgcaaaacgagactaaggcatattcaaaagaagaagattgtgctctgtattcagatcgtcctactacctatgttagtttgcttccggggcagtttgtgattgtatatccggaagatcctcatgctccggttattggtagtggtaaaatacgtaaactgatagccaaagtgaagctctgaattattgttgtttttatatggaaaaggtagtgtcgtccatagcagaaggcactacctttttcatgcataaagtgttatagactctagtccatttagtaattctcgaatatataataaaatatttaattaaatatttggcttataataaaaatagtattatgtttgcaataatttaatgcgagtgaaacataaaaattgctttatatgaaaaacaaaagtatttatccttgggtagtagtcggtttattgtggatagtggcacttcttaattatatggaccgccaaatgctttctactatgcaagaagctatgaaagtagatattgtagaactgaataaagcagaagcttttggggctttaatggctatatttttgtggatctatggttttatgagtcccgttgccgggattatagcggatagggtaaatcgtaagtggctagttgtcggtagtctttttgtttggtccgctgtcactttcttgatggggtatgcccatgattttcatgaactttattggctgcgtgctataatgggagtcagtgaagcattgtatattccttcggctttgtcgttaattgctgactggcacgaagggaagtcacgttctttggcagtgggagtacacatgaccggtttatatgtagggcaggctattggtggttttggagctacggctgctgcggctttctcctggcaggctacttttcattggtttggtatcgtggggattgtctattctttggtactcatattatttttgaaagaaaatcctattcataatgtttctagcaagaaaatagataatgttcctggagaaaagaaaccttccataataagtggactttccttactgtttactaactgggcattttggattattcttttctattttgctgctcccagtcttccggggtgggcaacaaagaattggcttccgaccttatttgcagatagtttgaatattccgatgtccgaagccggcccgatatctaccataacgattgcagtttcttcttttatcggcgttattttaggtggcatcttgtcagaccgttgggtacaaaaaaatattcgtggacgggtctataccggagctatcggtttgggaatgactataccggctttacttctgctgggttttggacatagttttgttagcgtgattggtgcaggcttactcttcggaattggctttggaatatttgacgctaataatatgcctattttatgtcagtttgtatcggcgaaacatcgtgcaacggcttatggtattatgaatatgaccggcgtgtttgccggagctgctgtgacagaagtgttagggaaatggacggatggaggaagcttgggacagggatttgcaatgttgagcattgtagtggctgtggcattggtacttcaaatctatttcttaaggccgaagacagataatatggtagattaagagtatataataactttataaaaaataaaataatggaacgaattaaaggacttattgacgcaccgtttactcctttttatgagaatggtgaggtgaatttagaaccaattgaagcatatgctaagatgctggtaaagaatggactgcaaggagtgtttatcaatggttcttccggtgaaggctatatgttgacagaagaagaacgtatgcgattggccgaacgttgggtttctgttgctcctgagggttttaaggttatagtgcatgttggtagctgctgtgtaaaggctagccgtatgttggcagagcatgcacaaaaaataggcgcatgggggattggtgctatggctcctccttttccgaagattggtcgtattgaggaactggtaaaatatatcgaagaaatagcagctggggcacccgaactgcctttctattattatcatattccggcgttcaatggtgcttttttaccaatggttaagctattggaagcggtagacggtcgtgttcccaattttgcaggtattaaatatacttttgagagtatgtatgaatataaccaatgtcgtttatataaaaatggaaaattcgatatgctgcatggacaggatgagacaattcttccttgtctggctatgggaggcgctcaaggtggcattggaggaacaactaattataacggtaaagaattggtcggtattattgaggcttgggaggcaggtgatatagaaactgctcgcgaacgccaaaacttctcacaagaagtaataaacgtgatttgtcatttccgtgggaatattgtcggcggaaaacgtatcatgaagttgatagggcttgatttgggcaagaaccgtactccgtttcagaatatgacagatgaagaagaagcgcagatgaaagcggaacttgaagctattcatttttttgaccgatgcaataaattttaaaaacgcatagcatgaatacaacagaatatttgagtaagtgggctatatcatataaagacgatataataaataatattatgccgttttggatgaagtatgggttagatagagaacatgaaggggtgtatacatgcgttaatcgtgacggtagtttgatggatactaccaagtcggtttggtttcagggacgttttggatttatagctgcatatgcatataataatatagaaaagaatcctcaatggctggcagcctcaaaaagttgtattgattttatcgaagcacattgttttgatacggacggacatatgttttttgaagttacagaagacggaaagcccttgcgtaaacgccgttatgtgttttctgaaggttttgctgcaatagcaatggctgagtatgcattagcaacaggtgaaaaagaatatgcgaaaaaagctttggatatatttaaacgtaccttgcatttcctgaatactccgggatttcttgagccaaaatatttgcctactctgccttcaagaggtcattctataacaatgatcttgattaacacggcttctcgtatccgtatggttattgatgatccgtcgttgacagagcagatagatacttcgattgcagcgttacgtaaatattttattcatccggagtttagagctttgcttgaaatggtgggacctgacggtgaattcatagatacttgtaacgggcgcgttataaacccggggcactgtattgaaactgcgtggtttatcatggaagaagctaaatatcgtaattgggataaggacttacttcagttggctcttcagattcttgattggtcttgggagtggggatgggacaaggaattcggaggaattatcaatttccgtgactgtcggaatcttcctgttcaggactattctcaggatatgaaattctggtggccgcaaacagaagctattattgccactttatatgcttatcaggctaccggagatgaaaaatatcttcagatgcatcaacaggtgagtgattgggcgtatgctcatttcccggataaggaatatggggaatggtatggttatcttcatcgcgacggtactgtggcccaacccgctaaggggaatctttttaaaggacctttccatatacctcgtatgatgattcgtggttatatgctttgtaaagaacttctttgagatatcactgttgatagttaaagatacttttatttagtaaagcacgtagagaagccggcaagataaaagtctgcaagtatatatgaagcgtaacgcagatgatgttcaggtgttgtcagttacgcagaatttgacaagaaaccgccagtgctgaattcaaccccttattttggattcaccactggtaaggttttctttttttgaaaaacattcatttcttcacttttccctgtttgtctgtgttagtggataaaggatggggtgcgaggagttcacttccatttttcattatagcaagtctttatttcattatagtaaatctgaatatgcttatagcataaattatactcatcgcgtatatttttccttcttgtagttgaaacaaacttctaggattttataaagcactgctttaagtaggcaaaagcaatgctttacacctcctaaagcattgctttagatttctcaaaacgatgtgatatataggtatggtgaaggaggtctgaacaaatttattggagttgtaattaacaaacatgagcaaacgtttgaagtaatcgtcctgggtctcaataattgtcggggacttaaagaatccgtaccatttgtgatacctgttgctgttacacttgtatagatgactctgttttgcttatgcaatctgtcattataccggtaattgattttggttctacaacaacccctagagaattgaataagtgtggtgttgtcaataaataaatgcctgtttttataagtattattggtgaatgaatagatagtggttacaagtgaatgcataagttcaattagaacttagttgagttatttattcatattttcttctatcttatagaggatttagatataaatcaccgatatgtatatcttaaatcgctgcaaatatatttatattattaatatctgcaaagtatttaataaattattttcttatatatgctattaaatataaaaat

SEQ ID NO: 3074 - DNA, 249 bp, Unknown
  gut microbiota DNA sequence
tcaaatcatttccagtttttagaagataagcgtattgacagtcttgctaaggctaatgcaattcaaaactattacaaggcttggaacgcttttcgcaaggttcatgaagctggtgtgccaaaatttcatcgtaaaagctatgcctggcgataccagaccaactgtcaatatccaaaacaaaagacggcccggctagacaatggtaccgtctgctttgaagatcgcaaacatattgtggtacctaaacta

SEQ ID NO: 3075 - DNA, 6415 bp, Unknown
  gut microbiota DNA sequence
caaagccccagcttgtgaaagtcggggctttgtgcttaaaaaaaagaaggtgcgcattttgacacacctccactccttatttattattaatgtaattctgattgttgccgggcttagaatgacagacccagacggaagccgaaattgctcaaaccgtctacactgtaatgcagtacatcagccttgttggtaccatagctgtaatataaagcaaagtgaagccccggtccgtatacccaagggaatacgttgataccgatttcaggagaagcgtagaatccccagctattgtctcttgcttcgagcatattgaagttagagcgtactttagcatattcagcacctaatttagcactgacgtagggttgaacggctccgccacgattccattggtagcgtgcggcagcaccgaaaggcaactggaatatagtatgttgctgatcggtagtgacatcaccaccggccattttgaatgtttcgcgacctacatattcgtggttgctgtgatagttcaggaaaagtcccaaaccgatgttgggagtcacgaagtaaccaccttcgaagttcattccccaaccacttgctttgtcggcaaaatgattgcttaacggagcattgaactgccagtctatattagcatatccgttgtctgatagctgtgccttggccggcatggcgaaagcgatagcaatgaccgccaaggccactaccttgaaatatatattttttcttgttttcataacagttgtagttgtttatttgttagtaagataaggtgactgagcgaatgactggttgacagcttctactgcaagagtacggttgatagctttggatccagtgtcaaatccggtcagatagctagtccatacaacgggcagctttttgctttcgccttgttcggctttcaagttcaccatttctgtcaggaatgagttggtactataactgtaagtcacagcgtacgggtagtaccagccgccaccccagtttccgccccagtagttcggcccccagtaaccgggataaccccaccaccattcaggctgtgaataactggtgaaataataagtacttgcgatgtagctcacctgaatacccaagtcagcgctttctttgttggttgctgctgcataacctctggcaatcatgttatccgtataagctgccagaatttgttcagcgccttctccttcgagatattccggttctttactatcggagatcaccagaatcttgtctgccagatagaatgtaggaactttgaagtcagctttctcgtcgtggttagtgtataccagatagttgtcatccagcttacccatgtccgggtctttttcgcaggaagcgagtgcaaagaccgccaataaaataggaattaatttcttcatatcttttataatgtttaggttatataaaatcatcgccctggtaccttggggcttttgctagaaacaacaagaaaaaaataaaaaggttcgcgtgaaaaattattttgccggaaaattaacatctttctttttcgggattcaataaaaaaggtaagctctttgccgcatcaacagctagtttgcttaccattcattctttacagattcttgcttgaaattccgtttatttaaacagaggtttcagcagttccggcatttccaccttgtcaacttccagttcgctaacccgttgtttgcctgttgaagacaggtgaaagtacatttgccggcggtcctcgttgccgagttccctgacaatcaatcctttttcttccagtatccggagcattttcgatgtatgtgagggacttaaatctgtacttttcgacaggttagttgccgtcattctctcggtggcgtctttgaggatgcataatatcatcgcttcattcaacgttatccggtatactttttcaaatgcagtttcaaagctcgacatggctctgaacacttcgcgcattgcacatattgttttcatattttgtttgaatatattttattagtcatatcttttaaataaatagattcacgttcgcgttatccgcccgttccatatacgttgctacgccgcctaccgttacttcgtcgaggagttcttcttgtttcactcccatgacgtccattgacatttgacaagcaataaattccactccgttttctaaggcttgctgacgcagggattccaatgaatctattcctttcttattcatgatataccgcatcatttttccccctattccgcccatgctcatcttcgagagtttcagctttccggaactggaaggcagcatcataccgaacatctttccgaagatatctttttcggttttcggcttgtgcaacttcttgataacgttcagtccccagaatgtgaagaagattgtcaccttctgtccggtagctgctgcaccatttgcgagtacaaaagttgctaaagctttgtccaaatcatcactaaacatgatgaaagtttttcctttgctgtcacaagaagtaacaatgttgcacgattttggttctcccttttcaataactatcacagattttcctccggaagactctttcgaaacgagttggttaccggttgaattgcaccatgcggcggcgtcacgagggaaccccggatcagttgcagtgatttcaacgcgttctcccgaagcgagcatgtccattgtcttcttcatctttaaaatcgggccgggacattgtaggccgcaggcgtctacccggatagtcttggctgtttcgacaggagcaactggtttgctagcctgaaccgttgcttcttgccgtactgttgtctcgtccgtctcattatcattttcttcgtgtataatgataggagcggtagcagcgcgatatgtttttagtccgcccgacagattacggactttttcaaatccgtgctgtgtcagtatccggtaagcaagataccctctcaatcctacggcgcagaatgtataaatcatcttgtctttcggcagttcggctatcctgtccctcagttcgtccaaaggaatattcacagctcccggcagcgtgcccaatgaaaattcatcctgtgtgcggacatccagcaggaatttgttttccatttcgatgtctctcaattcccgccagtaggcaggtcgtgttcttccggaaataatatcctccgccacgtatcctgcaagagctaccggatctttggcagacgagaacggaggagcatacgcctgttccactttcatcaggtcgtagattgtacctttatattttatcacaagcgctatttcgtcaatccgcttgtctactccgtcataaccgacaatctgtcctccgtacaaccttcccgtttttttatcgaatgtgattttgatactcatcggcatggcattcggataataaccggcgtgcgaagcaggatgaatagtagaagacatatagtcgatctctgcctgtcgcaaccgtttgccgggtaaaccggtagaagcgaccgtcagatcgaatacttttgcgattgaagtaccgatcgatccctcataaggaattttggcgcctaggatattgtcggctacgatacgtccctgtcgattggcaggtccggccagatagttgagccacggtttgcccgtaatcgggtggcggaattcgatagcgtcgccgatcgcataaatcgattcatcggaagtttgtagatagtcattcacagcgatgcctccggtttcaccgattgtcagttcggcagcccgtgccagattcgtttccggacgcacgccgatagataggatgacaatatcggcaggaacggactgtccgttcttgaaaataactttcagtcctttcccttctctttcgaaagaggctacggcttgttccagatacagatttactcctttttccattaaatgttggtgaacaagcgaagccatggagaaatcaatgggggccattacctgatttcccatttctacaattgaaacttttgctccttgtgcgtgcaggttttctgccatttcgagtccgataaatccggctccgatgacaacggctcttcggggagcatgggtattgatatattctttaatccgatccgtgtccgctacatttcttaatgtgaagattccgttcaggtcgattcccggcaggggaggacgtacgggggaggcaccggtggaaataagtagtttgtcgtaactttcctgataagtgtcctcgctgctgcggcggacagtaacggtttttcttttccggtcgatgaagatcacttcattttccgtacgcacgtcaacacgaaatcgtgtggagaatgcttcgggagtctgcacgaataatttctctcgttcctcaatcactcctcctatataatagggcagcccgcaattagcataagatatatactttcctttttccagaaggataatttctgcggcttcgtctactcgtctgattcgggcggcagtggtagctcctcctgcaacacctccgatgataataactttcatatattctgtttttggtgtaaatagtttcctgtggaaataacaacagtatgaaagaaatgttcatggattcacggaaaaaacttatatttgcgcaccctgttttcattcttctatttttaatataggtaaattatgagtaaaattcttgttattgacgatgaagttcagattcgtagcctgttggcgcgtatgctgggactggagggctatgaagtatgtcaggccggcgactgcaaggctgctctcaaacagttggagacacaatcgcctgatgtggcgctatgcgatgtctttcttcctgatggaaatggggtagacttggtgctgaacattaaaaagttagctcctaacgtcgaagtgattcttcttactgcccacggcaatattcctgatggggtacaggctatcaagaacggtgcattcgattatataaccaaaggcgatgataacaacaagattatcccgctgattagtcgtgccgtagagaaagcaaaaatgaatgtccggctcgaaaaactcgaaaagaaggtggggcagatgtattcgtttgattctatcttgggcgaatcgaaagctttgaaagaggccgtactgctggctcagaaagtttcggtgactgatgtcccggtactattgaccggagaaaccggaaccggaaaagaagtctttgcgcaagccatacattacagcagcaaacggagtaaacagaatttcgtagcggtcaactgttcttctttcagcaaagaactgttggagagtgaaatgttcggtcacagagccggttcatttaccggagcattgaaagataagaaagggctttttgaagaagctaacaatgggactatctttctggacgaaataggcgaaatggcttttgaactgcaagccaaactattgcgtatcctcgaaacgggcgaatatataaagatcggtgacacgaaacctacaagagtaaacgtgcgtatcatcgctgccaccaaccgcaatttgcaggaagaaatcagggtgggacatttccgtgaagacttgttttatcgtctttccgtgtttcaggtgcatcttccttcacttcgcgaacgtgccggcgatattaagatcttggctactgcctttgccaaaagtttctccgagtgcctttcgtatgccgtcaacgaaatgactcccgcttttctggaagccttggaacaacaaccttggaagggcaatatccgtgaattgaggaatgtgattgagcgcagcctgattgtctgtgaaggcggacggttggatgtatgtgaccttcctttggagattcagaacaatcattacgaatgctcggatgataatgccgggaattttgaattggcagctatggaaaaaagacatattgcacgagtgttggagtatacgaaaggcaataagacggaagctgcccgtctgctgaaaattgggcttactacgttgtatcggaagatagaagaatataaaatctgaaaaaagaggaagttaagagagaatttccacgtaccttcggcagtgctgaaagaagctatacccaggctttgtaagaagatgttttaaacattctaaagggtattgccggagtatcagtcttagcaaatgtgaagctaagtcttcagtatctgtcactaactgtaagtttagctgtggcacggggcttggcagtcccttcgttacttttttgtacaaggcttgtcttgtcaaaacggcgtgggctgatgagtcttaagtggggctcgctggaaatgagttgtttcacttttatttgctgctgaattcaatttataaaattaggggtgtcgcatttataacttgaacttagttttctaccagaaaagatttttcagtttcatatctcatattctcatgttttttgtataactaatttgttttcaattaattaatttatgagaaataaaaaggaacggagttatttctcat

SEQ ID NO: 3076 - DNA, 178 bp, Unknown
  gut microbiota DNA sequence
tcacaaggcttggaacgcttttcgcaaggttcatgaagccggtgtgccaaaatttcatcgtaaaagctatgcctggcgataccagaccaactgtcaatacccaaagcaaaagacggcccggctagacaatggtaccgtctgctttgaagatcgcaaacatattgtggtacctaaacta

SEQ ID NO: 3077 - DNA, 72681 bp, Unknown
  gut microbiota DNA sequence
ttatgaaccgcttggaacacggtacgaatcctaattacaaatatatcgtatccgacaatccggaacaaatatcagcaggcaaaaatgaaaataaacctcgttatttttgatttttacctgcaataatattatatttgcaaacaaataagagttgtttgacagcatgagaaatatagtgtatcaaagcactttaccaatttcttatccgttgcctattctcatgcgagtttcttttaatctatttgtagtcaattaaataccttcagactacatcaaatatacaaaaaagattttttctaaaaaaaataattaatacgatgcagtatttcccaatcccctgcatttattatataaaaagcaaacgtagaatgatcaaacctatatatcattaagacctataacctgaacttaacaagtgtggggaaaaacagaaaagagagagagttttaaagaaatgtccccaaaaacgaagaacccctgccaactgagaaagctggcaggggttcatttttatatcttcgaaaaaagcaatctttacttgcaatatttctttatcagatcatccgtattcggatcacccagttcttttgctttattgaaattgccgcaagcttcatccgttttcttcaactgtatctgacaaagtccgagcagacgataggcctcggcatatttcggatcttctttcaatatattattcaatatttgaacagcctcttcataccgtcccacacgcaggtttaccactgcttgctctgccttataagtcaggtctttcggattcagttcaatcgccttggcaatatcatccaatgcacgttgatactggcgtgctttcagggcagcttgttctcgataataatagaacatatcattcacctgtccgttgactgctttaaaataagcatcgtaatcgagcatcgcattacgcgcctgattggcattcagattcatctgtgcacgttccagaagataaggagcaaacgcggaagtaaccggttgcggacaacgggcgatacaactatccattaatacaataacttctttcggatccgctttcagcaattccttggttttagcggcactaaagaaggtagcaggagaagcaatattgctggcgttcactttctcataagcagccaaagcacctgcatagtcctgttgggcaaacagaatatccccttccagctgagtgtaaacaggaagcggatcaatagcgattgcctggcggagattcttcaaagccgtgtcatacgtccagtctttatacgtcttctcaggcttcgataattggtaagcatgcatcaacttggcaatgttgtaatacacatcatcctttttctgtgctaccttcaatgccttattaaagtcggcaaccgccttgtcaaaccaagattggtcttcctgtcccttagttacataataattggcacggcgaatatacccgtccgtgctgttcgggaactggcggataaaatcatccaatagtttgccgtactcttcatccgtcatttgtgaagaagccataaacaagtaaaccaatgcctgatcttccacttcgggcagtcctttcctgattccgatacttttcagcgcagcatcacccaaagaaagcgcattgattttttgtgccatggcaaaagcggtccctgctgcatagcaagtagtcaccgtatcaattccggaggacttctgggaaataccgaatacctgtccttccgcattcatcaccgggcaactaaccattttatctttcatctgcatacccaacgtataataatgatattctccggccactttggagacatctttcactttaccggatacacaagcaatactcttttgtgtcgaataaggaagcatccatgcatcggctcccacttccggagcagcttttgccacgttcaacgcaggaactttcttctcggtaatggctacacggaacttaataacatcgtacatatcattagctccaagtatcacgtctaccggcatttgcttgccgtccgccgtgataaccaccgcacgttccgctcctttaaaaaggctataatcagataaagccaatccgtcttcggatacaaaaaatccgttcccggtgttcagcatcttatcattcttgtcataagtcaccacagagaaaactgcgcgtttcgccttctccacccatttaggggtttgtgccatgcttccctgtaccagaaagaaaagcaccaaaggtaggattaaaatcttcttcatatcagtcgttgtttctttgtttcacagcttcgtaaatcaggataccggcagcaacagacacattgagggattcgattgttcccaacatcggtatcttcacccattcgtcacagagtgccaggttatcataagagactcccgtatcctccgcacccataatgatgcataacggtcctgtataatcagctttcgtatagtcgtagtctcctttttccgtagcagcaacaatacggaaaccactatccttcaagtattgcagagtcgcacgcagattttgctcacgacataccggaagggtatgcaatgcccctgcagaagttttcacagcatccgcattcacagaagcactgccacgagccggaataatcacagcgtctacggctgcacattcacaggtacgggcaattgcaccgaaattgcgtacatcggtcactccgtcaagcatgacgaaaaacggattcttcccttgttcgaacaagaaaggaacgagatcttccgtcttctgataagtcacggatgaaatgaaagccaccacaccctgatgatttttccgggtgatacggttaatacgctccaccggaacacgctgaacgggtatcagcagacctttcaaagctgcaaaaagttctttggaaagatcactctgaatgtctttctttaccagaatcttatcaatctctttaccagcctgaatggcctctatcacggcacgaacgccgaaaatcatttcacttttatcaagcatctatgttaatttactgttttataatttactatttatcagttgcgggcaagcagggctttggcattgctaagggcagcttcggtcaatgtagcaccacttaacatgtgtgcaatctcctctacccgttcctcgtcggtgagacgtcggatgtggctgttggtttccgtatcgctgtccttcttatatactttataatgggcccctccccgggcagctatctgcggcaggtgagtgatactgataacctgacggttctgttcgcccatttcctgcatcatgtctgccatgcggtcggctatttcaccggatactccggtgtcaatctcatcaaatacgatagtcggcagtttcacggctccggcaatcattgctttgatagacagcatgacacgcgctatttcacctcccgaagcgacggaagaaatgttctgcaacacaccgttcttgttggcagaaaacaagaagctgacagtatcttctccctgtaatccgggttctttctttaaccccatttccacctggaaacggacattcggcattcccaacggtaccaaccgggctgccaactgtttttccacctcacgcgcagccgctgcacgggctttggtcaacacttccgcctgctgcttgacctgtttatattgttcttccttacgttctgtcagttcggcaatgcgctcatcgtaagaagtgatatcggacaacttgccacgatattcctccgtcaaagcaatcagctcctcaagtgtctgcacacggtgtttctgttgcagggaatagatcatgttcagacggtcgttcacctcatccagccttgtaggattgaactcgatagactcaccttgcgaagatacctcctgcgaaatatctttcagttcgatataggcactttccatacgttcggcaagttccttggcaggctgataaactctttgcaagttattcagcgtattgagactgtcctttaaataggaaagcaatcctccttcgtccgaagcaaaagactgttccacccgataaagccccgccttgatctcctccgcatgacttaacatttcagcctcttgttccagttcctcctgctctccttcggcaagatgagcttcttcaagctgctccagttgaaaacggatataatcttcatcggcacggcttttctcagccagttccattaactcggacagctctctttcagtctgtttccacccggcataacgagagtgatatttctccagtgccgcatcattatgtgcaagaatgtcgagcacattcaactgaaacccttccttattgagcaacaggttctgatgttgcgaatgtacatcaatcaactgttcgcccaactcttttacctgcaccaaagatgcgggagtatcattaataaatgcccggcttttaccggatgcctgcacttcacggcgcaagatgcactcctcatcatattccagctcgttctcctcaaagaacgggcgcataccatacgctgaaatatcaaaacgtgcctctattacacatttggaagccccccggcgaatggccttcatatccgcccgctgcccaagcaacagaccgattgctcccagaataattgactttccggcccccgtttcacctgttataacggaaaagcctgtttcaaaactgatgtccagtttctctatcaatgcgtaattctgaatgtataatgaacgtaacatttggatcagtgaaagttaagggttgagagttaagagtttcaattcatcagacagacgatcgataatatcttgagctacttccgtttttgatttcagggggtagtcagtacggccttttctgtctattatacttattttattcgtatcgtaacggaatccggctcccgcatcattgagcgaattaagtacaatgaagtcgaagttcttgcgttcgagctttccttcggcattctgctgttcattgttcgtttcgagggcaaagcctaccaacaactgattcttacctttcaacgctcccagacttgccgcaatatcttcggttgcctgaagatgcagagtcagttcttcctccttctcacgtttaattttcttatcggctaccacctccggacggaaatcggctactgccgcacaaagaatacccgcatcggcttcggcaaagtattttttcgacgctaccgacatttcgccggcagactctacatcaatgcgacgaatgcgggaatgttgtgttttcagttgcacgggtcccgctatcagtgtcacctgcgctccacgacgtgcacattcttccgcgagggcaaaccccatttttccggaagaatagttgccgataaaacggacagggtcaatcttctcataagtcggcccggctgtaatcattattttcttaccttgcagctcaccgtttgcagaaaaaaattcatccagcacacggatgatattctccggttcctccatacgtcccttccctacaagatgactggcaagctcacccgtacccggctcgataatatgattgccgtaagaacgaagtatctccagattcttctgagtggcaggatgagcatacatatcgaggtccatagccggagctacaaacaccggagctttcgccgaaagataggtcgttatcagcatattatcagctatcccgtttgccattttgccaatggtagaggcagtggcgggagctatcagcatcgcatctgcccacagtccgaggtcaacgtggctgttccacgttccgtcacgttgggcaaagaattcactgatgaccggtttgctggtcaaagccgatagagtaatgggagtaataaattcttttcccgccggagtaatcacaacctgcacttccgctccttgcctgataagtccgcggatgatatagcaagccttatatgcggcaatactgccggtaattccaagaattatcttttttccttttagcattatttcgtaatcaaattactcatttcacgcaagcggatcttagtcaaggccgccttcgtattcagcgtgaaatcactattcaaaatccaactgtaatatccggggtctttcttcaacacctcggctaccgacattcctttatactttccgaagttgaacacttccgttccattatcatcgtaaaccatacgtcctgcaaaatctacgtttttgctgaaactggaataatcggcaaggaatgcgatgtcattctgaagatccggataacggtcgagctgtgccttcagcacctcgtatgtagcccgtgtatccgcttcggcagtgtgcgcatcttccagattcttctcgcaatagaacttgtaggctgcggacagggtacgttgttccattttatgaaatatcacctgtacatccacaaatttacgtttgctcatatcaatgtccaccccggcacgcagaaattcttctgccagcacaggaatatcaaaacggttggaattgaatccggccaggtcgcatccttcaatgtcgcgggcaatattctttgccacttccttgaaagtcgggcaatctgccacgtcagcgtcataaatgccatgcacggcggaagatgcttcggggatgtgcatttcgggattgatgcgcagagttttcgcttcctcattcccgttcgggtaaactttcaaataacagatttcaacgattcggtctgtgttgatattggttcctgtcgtctcaagatcgaaaaagacaatagggtttttcagatttaatttcatttttattcattttgtttcacaacagaggacgcggaggacatagagagtaaatgaaaggaatgtcattcaaattatcctctgtgtcctccgtgtcctctgtcgtgaaatgtatattaatcgttcaacatcatcggcattaacaacatcagcaggtcttcattttcttcctgttccaccggtacgatgacaccggcacgtgaaggatcggcaagttcgataacaacttcgtctgccgaaatattgttaagaatgtcgattaggaatgtagacttgaatccgatgctcattgccgcacctgcatactggcagacttgtgtttcttcggcagaagtggagaagtcgatatcttgtgcggaaatcacgatctggttctcctgcatacgaagtttaatcaagctgctggcctgtgacgagaagatagacacacggcgcaaagctccgatcagctgttgccggtcgaccgtcactttatgcgggttgttctgcggaattacagagttgtagttcggatagcgtccttcgatcaaacggcataccatgcgatagctatcgagcataaacacagcgttgcgttcatcaaattcgatcgtcacagagccttgttccttcggcagaaggtttttgagcaatgtagccggttttttgggaaggatgaaagcagcacgttcgttacccttggcagccagcgtcttgcaacgtaccagcttgtggccgtccgaagccaccattgtgatatcttctgttgtaatatcgaaataaataccgttcatcaccgggcggagttcgtcgtcggcagtagcgaagaccgagcggttgattccccccagcaacacttccgcttccatttccacacgaactgcgttgtcacccaatgtagccgattgcggaaattcgtccgcattctgtcccattaggctgtatttcccattctggtactgcactgttatttcgtagttgtccggattgatcaagaacgtgagaggttgttccggaatttctttcagtgcgtcgagcaaagttttcgctactacggcaaaacgcccgttggtatcgctttcattcacttctacggtagtaaccattgtagtttcactgtcagatacagtcacagacaatgttccgtcttccagttcgaagaggaaacaatcgagaataggcagcgcattttttgaattaatcacacggctgatagcctgtaaatggctggaaagagcagtacttgaaacgataaatttcatatattttcgtgtatttaagttttaaatgttctatcgcacaaagttacgaaaaaagattggggctacccaataaaaacaaaagaaaaaaacaggctttgtgtgaaggatattactaaaaaattgtaacttcgccgcagaatttaaaattattgcaatggaatttacaggaaaaatcatcgctatcctctctccgagaggcggagtttcaaaaactagcggcaacgagtggaaatcacaagagtacgtaatcgaaaaccatgaccaatatccgcgtaaaatgtgtttcgacgtgtttggcgcagacaaaatcgagcagttcaacattcaaatgggcgaagaactgaccgtatcattcgacgttgacgcccgccagtggaacgaccgttggttcaacagtatccgtgcatggaaagtggagcgtgtaggcgcaggtgctccaatggctccgggtgctcccgttcctcctccggctcctgccgctactccggaatttactccgggtgatgccaaggacgatctgcctttctaagccgaaagtattccgcttgacgatacagataaaaaaactcccggtgagaatgattcttgccgggagtttttttatacccgcactttgtaaagattccgccgtgggctaagcgttcttcatcccggggccggacgacgctccgctgcgggacgggaaaaatccgcccacgacttacggaagaaacaaagcaatatcagcaacagcagttcccccgaaaaaaattcaaccagcaacagcaacagcagttttatctttctttttctttctgtttctattctttctcttatactctcttctcttctcttggcttatggttcggttatggttcggttttcgcaccctgccagaaggcgtttcagaagttttatttttcgaaaaaagagcgatattttttttatttgttttttgcaggttttccgttgtttttccatagttttttccactcttccagtcaggatattcctgttcgagaacgtcctttttccgtatagaaaaacagcctttcagatgaattttccgaatggattttactccgatttataccgcaaaacaatattgggatataccactccgtcagcacaagtaaactgggcaaagagtataaaattacgaaaaaattcggagttgcgcaggaagaaatccggcacgaaatgaatttgctttgctgcctgatgaaacagatgatcgaagtctgccattaacatgaaatggtaggaatcggacaagttatccattcctgtccggtatgctatcgctccattgagcacctcgcctttatccaactggcgtatgtaacgggacagactattttcatcgggcgccaacagcaaacgcccttcataaaatgtggcgtatgtatgcgatgtcggttcggcaaaaccagttagttgcgtaaacaacgttgtttgaggcaggcgatagacggggtaagctttattggcagtataacaaaaagttatcaggggtgtttttccccgttcttcggcagaaacggtgttgataagagagcgcagcatccgttccgcttccgtcacgtccgacaccgacaggctcagaaccgccgccgcttcctgcaacgtatcttcacgctggaaaagacaggcaaccagttcctgcccggcattctccattagataatgagacaactcccgattcctattccgcacgtcactggtacgaacgcccgtctcctgcatatctccataagaaagcagagatgcccagtccgtgactccctgtttagtgaaatagaaagcggtggaaggcaatgcctcacccggaaatccttccactgattcctgctgacgaagcacattcataaacgtgaagcaagtatccgtttcgtgacagacacccgtaaaataaatgaaatcatcccgcagcttcatatcaaactccgtccagcccatcataccttccaaatgggcataaacagtggcaaccgccggacttttcttcggggcggccgcttctgcaaaggtaggatcgtccgccaatgattttccggtcttgtgagcatcaataacggtttctatcaacttcttctgataactcaaagccataaaatcggatgtcaggtagcatgccagaaaatccccgtccgccataggataaatcgttatatcctctcccttatatttgaaagttttcggtggataaagagatgagacatacttctgcacgaaacggtcaatcagttgccggtcgccctcccccaatctgcaatatagcacctggttatgaatattgtccggctcatgaaaactaatcaacatttgattcatttgccggctcaatccgtgaggcgcttcttcctgaagggtataaagatactgtttcagatacgaaaacagtttggatacatgaagatattgctgatttttactacaagccagatcgtctacttccgccacaaattccagtatgtcatcagtgacaaaaactgccgaagcagagggcggaaccaattcgtagagattgaaatccttttttccttcggcggccgacagcctgaaaaaagagtacaaagcgaaacctgcgcacaaaagtacaacagaagaagtgatcgctattttcactatcgtacgaagtttcataatattcgctgtttatcggctaagtgcaaaaataataatttctacaaagaaaacaaaacttttgctaaatatttcaccggaaatcaaagaaggatttccaatccgtcgtatgccaggtgaatattctccgggagtttccgttccacctctgcatgcaagcccatatcatgactcatgtgtataaagtatgttttcttcgcccgaatgcgctgcgcaaccgccaacgcctcctccaaatcctgatgtgtgggatgcggggctatccgtagtgcattcactatcaaaacatctattccggctaattgttcatacgattcttcgggcatagtcagcatatcggtgatgtagccgagctgtccgatgcggtaacccagaatcggcagccgcccgtgcatcacacgcaaaggtatgacctccgtagtatttataaagaatttctgcccgaccgatatttcctgcaaaggaatatcgggaacacccgggtagcgatgatctacaaaacagtagggcatacgcaagcgcaaagcgtccgacacgtattgttccgcatagataggcacagaaccgaaacggcagaacggacgcaaatcatccagcccgcccacatggtcataatgttcgtgagtaatcagcacaccgtctatcctttcaaaaggcaggcgtaagacctgcgtccgaaaatcgggaccgcagtcaatcagtatccgtgcatcgcctgtctctacaatagcagacgtgcgcaaccggttatctttcgggtcggcagaagtacagaccggacacgtacagccaatctgagggactcccgtcgatgttccacttccaagtattcttattttcatttctttcagacgaaatttacttccggatgtatatctatgccgaacttctcacggacagaagcccgcaccgcatccgaaagcgcaattatatcactacctttcgctccaccgcaattcaccagcaccaaggcttgcttatcgtgtacagccgccggacctaaggctttccctttccacccgcactgatcgatcatccagccggcgggaatcttcacccgtccttccggcagttcgtagtagggcattcccggatattcctgctgtaaagcttccagcttctccctcggcacaatcgggttcataaagaaactaccggcatttcccattactttcgggtcgggcaacttagcctcacgaatgtcaataatgattttccggacgacaggcaaagtcagcgcaggatatttttcaagttcctgacgaatcgttccgtaatcgagcatataatgttcctctttactaagccggaagcagacatgagtcacaaaaacggatttgttctcaggacgtttgaagatactgttgcgataggcatagccacattcttcaacagaataaacgcgttcccgcccttgaatgttcaccgtttccacggttgttatcaagtcctttacttccacgccgtaggctccgatattctgcacagcgcttgcacctacctcgccgggaatgagtgaaaggttttcagctccataccacccgtgttctacacaatatgccacaaaatcatcccacaccacacctgcgcctacacgcacggaaacagagcgctcgtcttcctccgccgcttcgattccttcgatacgggagtgcaacaccactccttcatagtctttggtaaataacaggttgctgccgccgccaatatgcaaaaaaggtgtcgtaacggcaccttgctcaatcaacgtcttcagttcttccaccgaagcatattcaatgaaacggttggcactgacgtcaatgccgaaggtattgtagggtaaaagagaatacatcgtttaaagttatatagttattctattcgttatatgtcgataaatgcagactgttatattcgctatcatcagatgcttacatcttcaaatttatatagctcccattcgcctgctttccggcgaaaataaagaatattcgaaaacccgtttccgattcctttcagtgccaggattttagttggcgatccgtcatcattccgttgcccgtaattgatattcgaaaggcgttcggcaggcaatgccggcttgaaggcaaaccactggttcaaatcgagagtagtctccagcacagagaaatcatcgtccggatcggtagtaacaaaagccaatggctcacgcacacgctggctctggaaaaggctgtcggtagcgaaatggccgaagaactccacaaagtcctcgttttcatcccgttcgataggacgcagattgatagcctccagaatccacgctcccttgatacgctcaaagtaatatttcttcatcatccgtgtcttcacgaatatccactccacttgcacggaagtgagagaggtatctcctaccaagtccatgtcttcctctttatcaaacaggagcgtataataatgctgtttggtaaacaggttgtcgtgcttccagttacgttcctcgatattcgcctttttatctccgttgtagtagggcaacggaaatttcacacgctgacgttgcaacacatcatcggaagcaaaattatagatgaaatcgtcgaaagattcgtcagcctgtataggctgcggatcttccggcaattcatccaggtggattgaatcggctttgtgccggatagaatccacctcttgagtaatagatgcgaaggggtcaatcttagcttttttattgctacaagcacccagtaaaccgagtaatatgacccctgcaattagttttttcattattttaatttctctctaagcttttcaagcatatccaccgtcatgctttccaggtcataagccggcttccagccccactcttcacgagcacaggtgtcatccaggctgtcgggccaactatcggcaatgcgttgtttcaacgggtctacatcgtaaatcatctgaaactccggcacatgctttttgatagcttgatagatcgtctccggatcgaaactcatagaggcgatattgaaagcattgcggtgtatcaattttgtcggatcagcttccataagcgtaatcgctgcattcagcgcatccggcatatacatcatatccattaaagtgccttctttgataggacacacaaatttttcaccttttacagccgaataataaatgtcgacagcgtaatcagttgttcctccacccggaggggttacgttcgagataatgcccgggaaacggactgcacgagtgtcgacaccatatttattaaaatagtagtcgctcaacaactcggttgtcactttagtaactccatacatggtacgcggacgctgaatggtgtcctgcggcgtcttcgtatgaggtgtacttgcaccaaaagaaccgattgaactgggtgtaaacacggcacatccctgttcgcgcgctacttccaatacattccatagcccatcaatgccaatcttccaagccagcttcggcttcgattcggctaccactgatagcaaggcagccagattatacactgtgtcaatgtggtattctttcaccacagacgcaatcatttccccattggtcacgtcgacaatagccgccggtcctgattctttcaactctcccttaggttctgcacccgggatataaccagctaccacgtttgtgttaccatagcgtttacgtagctccatcgttaactcggagccgatctgtccggtggctccaataatcaaaatgtgtttcattttttcttcgtacttaaattattaagctaaatagtgcgcaaagtaagcacttttttttcagattttaatcaaaaagatatggttattccaataaaaattgtgtcctttgtaatcgaacttaattactcaaacactatgtacggtaaaatgaaagattttctcagccaaacattggctgaaattaaagaagccggtctttataaagaagaacgactaattgaaagtgcgcagcaagctgctatcactgtaaaaggtaaagaagtgctgaacttctgcgctaacaactacctgggactgtccaatcacccccgattgatcaaagcttcccaggaaatgatgaaccgacgcggatacggtatgtcctccgttcgtttcatttgtggaacacaagatatacacaaagaactggaagccgctatttccgactatttccaaacagaagacacgattctatatgctgcctgcttcgatgcaaacggtggtgtgttcgaaccgcttttctcggatcaggatgccattatctcggattctctgaaccatgcttctattatcgacggtgtacgtctttgcaaagctaaacgctatcgttacgccaatgctgacatgaacgagctggagaaatgcctgcaagaggcacaagctcaacgtttccgcattatcgtcacagacggcgtgttctctatggacggcaacgtagctcctatggatcagatttgtgaccttgccgagaaatatgatgcactggttatggtagacgaatcacactctgccggcgtggtaggcgctaccggacacggcgtaagcgaactctacaaaactcatggtcgtgtggatatttacaccggtacgctgggtaaagctttcggaggtgctttaggaggatttactaccggacgtaaggagattattgacttactgcgccaacgcagccgcccgtatctgttctccaactcattggctccgggcattatcggtgcaagcctggaagtattcaagatactgaaagaaagcaatgcgctgcatgacaaactcgtggagaatgtaaattacttccgcgacaagatgactgctgccggattcgatatcaaaccgacacaaagtgctatttgcgctgtcatgctgtatgacgcgaagttgtcacagatttatgccgcacgtatgcaggaggaaggtatctacgtaaccggattctattatccggtagttccgaaagaccaggcacgtatccgtgtacaaatctctgccggacacgagaaggaacatctcgacaagtgtatcgctgcctttatcaaagtaggtaaagaactcggtgtactgaaataaaaaacattttcttttcttccattgttattattgtaatcataaggatttgattatcgacaataacaatggaagatttttaatttatatatggaagaacttactctcaccacccctgctctgcttttctccgcagtttcactgatattattggcttacaccaatcgtttcttatcgtatgcacaacttgtacgccagctgcgagaccgctatatggaaaacccttcggacatcaccgtggcacagattgaaaacttacggaaacgactgaacctgacacgtaccatgcaagggctgggcattgcaagcctgtttttctgcgtagtgagtatgtttctgatttatatcggactgcaattattatccgcttatgtcttcggactggctttgattctgctgatcgcatctctgggcgtatctttccgcgagatacagatttctacccgttcgctggagatctatctcggggcaatggaaaaaggacacaaaaaatagattattcatctgcaaatccgcacactattacacatgaaatgaaaaagaagctgtccggaaataaatccaaacagcttcctatatattataaatatattttcagactattatcaacgttgtcccaactgtgagtcaacaaagaagataccggtgtcaccggctttcttgatcttatcaacgattccctgtgcagtagcttcttcttctacctgttcgcgaacgaatccccacaagaagtcctgagttgctttgtccttctcagcggcagctacgtcaaccagtttgtctaccaatgcagatacatggcattcgtgtttgtaaacgtgttcaaacacttccaacggagtaccccagccgttaggaacgacatcaatcttgtcgaccattgcagttccaccacgcttgataatataatcagccattgcataagcatgtcccatttcttcctgagactgtttcttcatccaatgtgcaaaaccgctgaaaccttctttctcaaagaagaaagacattgccaaatacaggttagacgaccacatttctgctgtgatctgttcattgattgccttttgtaatttttctgaaatcataatcgtatctttttattaagttgttaatgtagtttcttattgaactcattacaaaaataacaagatttcagttaaaattgttccgactcccctgtatttttaaactacattcacattttatttacaccaactcgtcagaagtatatcctttcggcaactcacgacagttgtaaccggaagccataatctcaccataggcacctgctgagcgaagagctatcaagtcgcctcgcttcaccttgttcagatcgatcgcttttccgaaaacatccgacgattcgcagataggccctactacatcataagattctaccggttcttcagaagtgatgttttccattttgtggtatgcctgatataaggcggggcggatcaagtccgtcatgcctgcatcaaggatagcgaatttctttttcgctccctgtttcacatataacactttggagatcaatgaaccgcattggccaacgactgcacgccccaactcaaaatgcagagtctgataaggacgcagtttcagttgtccggcataggttgagaaataatccttaaagttgggaattgcctgacggttgggatgtccgtaatcaatgcccaagccaccgcctacattgatgtgttccaccagaatgcgacgggcttccagcttatcctgcaattcgttgacacggttgcaaagggcaataaagtcacccatatccagaatctgagaaccgatgtgaaagtgaagtccgatgaatttgacatgcttcatttctactgccacatctatcactttatccatatcctgcatactgattccaaatttgttctcggctaggccggtcgtaatattggcatgagtatgcgcaccgacatctggattgatacggaaagccacattggctatcttattttgagcagcagcaagttcgtttatcacttccagttcaggaatagattctacattgaaacagaaaattccgtattccagtccgaggttaatctcccaatcggctttgcctactcccgcaaagacaattttgcttgcaggaaatccggcacggatagcagcacggatttctccaccactcacacaatctgctcccataccgctttcacggataatggtaagcactttcggattggcgtttgcttttactgcatagtgtacggaatagttaggatatttggcaacctcctggttgatagccgacaatgtatcacgcagcactttcgtatcgtaataatagaaaggtgtctgcaaagtacggaacttatcgattggaaatattcctttcataactcaaaaaacttgtttagttagttaaaaaagagcgcttttatcagtttggtaaaagcgctcaatataatttgtggaattatttgttgttgaaaagcatatcgctcagcgactgtaatgctgtcttcttgtcacattcccgaatgaggaaagaaatgttgtagttacttcctccgaatgaaatcattcgtaccggtatgtcacgcatggcgtcaagcgcttttgcttcgaaaccgacgttctcccactccaggtcgcccacgacgcagatgatacacatttctttgtcgacggtcactgtaccgtatttcttcaagtcatccagaatctcgttcaggtgtttcgtgttatctatcgtgacagacacaccgacttccgaagtacaaatcatatcgatcgaagtctggtaactttcaaagatttcgaatactttgcgcaggaaaccatgagcaagcaacatacggcttgacttgattttaatggccgtaatgttatcttttgcagctacagctttgattttccctttctctgtgtcattagaaattaatgtccccggagcatgcggatccattgtattcaacagacgtacagggatattggcatatttagcaggctgaatgcaggtcgggtgcagaatttttgcaccgaagtaagccaactcggctgcttcttcaaaatgcaactggcgaaccggggcagtcttatcgacaatgcgcgggtcgttgttgtgcattccgtcaatatctgtccatatctggatttcggaagcattcacggctgcaccaatcagggaagctgtgtaatcgctgccaccacgttgcaggttatcgatctcgccataagcgttgcggcagatgaaaccttgtgtgatataaatatccatatccggataaagttcgagctgtgcctgcagtttctccttaatatatacagggtccggttctgcgttcttgtcagtacgcatgaattccaaagccggaagcaatactgacttcacaccacattcctgcagatagaagttcaccatagccgtagagataagctctccctgtgccaaaaccactttctcttcgaacaaagtgaaaaggtctttagtgtaggagcggatgtagtcgaagtgagacttgatgacttccagacctttctgtttatactcctgagttgcgtacagttcatcaacgtgctgtttatatttagcctccagcttattgataatctcgttggcaccctccggattcttcttatacagatagtccgaaatttccaccaatgtgtttgtcgtacctgacatagctgaaaggacaacaatcttctgttcaccatcggtaatcaatttggctacttccttcatgcgctgagcagaacctacggaagttcctccaaactttaaaactttcattttcgttactgttttagttatctatatttaaatctatttctattgttctctgtcggggcatatattcgtcggtcacatcggtgatatgatgttcggcacaacggtataccctgccgggatattctttcagtaattgcagattgtgcgtcgtcatcactacggacgaaccggtttcacaaatgttgtgcaacaattctacaatggacttacctgtctctacatccaggtttccggtcggttcatccgccagaatgatagccggagaattaagtacggcacgtgcgattacgatacgctgctgttcgccgccggaaagctcgttagggattttatagcctttattggacatccccactaaatcaagtacttcctcaatacgttcttttatctcttgtttattcttccagccggtggcacgaagtacaaactccagattattgtacacggtacggtctgtcaacagttgaaaatcctgaaacacaatgcctaacttccggcgtagctgcgggatatgcttacgtttgatagagcgcatattatagcccagcacttccgcatcaccgtcaattacgtccagttcgccatacaaggtcttgagcagacttgtttttccggagcctacttttcctatcagatagacgaactctcctttgtgcagttccagatttacaccacttagcacacagagttcctgctgatgtatttctacgttcttatattgaattaatgcttcttccatgtactgctatgtctttcctgcaattcgcgtgcaaggtcttcgatgcggtaaccttttgaagttaataatacaatcatgtgataaatcaaatcggctccttcgtaaatcaaacgctcattggtgccgtttgttgcttcaatgacagtttctactgcttcttcgcccactttctgtgctatcttattgattccggattcgaacagactggtcgtataagaaccttccggcatttcttcatgacgtttgtcaataaaatcctgcaatactttcagaaacatgaccggttcttcattcttttcaccccaacaagtatccgtacctgtgtggcaaaccggacctaccggattcacctgtatcaataacgtatcattgtcacaatcggccttgatagaaacgacgtgaaggaaattgccgctctcttcgcctttcgtccaaagacggttctttgttcggctgaaaaaagttacttttccggtttctaccgttttatcataagcctctttattcatgaagcccagcatcaggactttacgtgtttcgttgtcctgtatgatagccggaacgagtccgttcatcttatcgaaatccaattccattttattttaagttcttaatttacttattcgctaattatgtgcaattatccaatgacaaatccttcgccgcagcctaaaaacctgtttttgcaacgcaacaattacctaatggtaattccttcgccgcaaagatacgattttaattcgggaatttttatttctccgaagtgaaaaacactggcagccagtgccgcatctgcttttccttgcaaaaaaacgtcacggaagtgctctttgcagcctgcacctcccgaagcaatcacaggaaccgaaagttgtccagccaaagcggcaagtgcctcgttcgcatatccggtctttactccgtcatgattcatgctcgtaaaaaggatttctccggccccacgttcctgtgcttcttttgtccagtcaaacagatccttgtcagtttcaatacgtccaccattcaggtagcatttccagcctttttccgtttgcttggcgtctactgccaacacacaaacctgcgaaccgaaattcttggcaatctcgtcaatcaactgcgggttgcggatagcagacgaattgatagaaatcttatcggcgccggcattcaacagacggtccacatcactcaattcattgattccaccgcctacggtaaacggaatattgatattggcagcaatccgttttaccaattccgtaaaagtcttacgcccctcatggctggcagtaatatccaggaaaacaagttcatcagctccctgttcactataagcacgtcccaattccaccggatcaccggcctggcgcaaatttacaaaattcgttcctttcacggtttgtccgtctttgatgtccagacaaggtactattctttttgctaacacaatcctatttttatttactgtttgacaattcaaaatcagactttcaaaagtctcaatccaaaaagattctcaagtcttgcagggtgagatgtccttcataaagagcttttccaaagattactccgggcactccggcttcgttcaaagcaataatgtcatcgacattacttaccccgccgctggccattagatagagatcggggaatttttccagcatttctttgtacaagtcaatagagggtcctttcagcatcccgtcgcaactgatgtccgtgcagatcactttccggacacctttatttatatagtcttcgaggaacgggaaaagttcacaggcgctttcgtctttccaaccgtttacggctatcttatgttcctttacgtccgctcccaatatgattttctcacttccatacacttccagccaatgacagaacagttcggggtctttcacggcaatactgccgcccgtcaccatttgcgcaccgctttcgaaagctattttcaaatcttcatcactctttactccgccgccaaaatctattattaaggaagtacgggtagcgatttgttccaatacccgatgattgattacatggtgagaagcagctccgtccaagtccaccacatgaagtctgcgaacaccgttcgcttcaaattccttggcaacttccaccggattttcgttatatactttcttactgtcataatctccctgggaaaggcgtacacactttccgtcaataatatcaatggctggaataatttctatcatctattatttatttgctatttgacaatttacagttctcttattactacctctttccaatctgttcaacaccgctttttatcccctcaaaaagtttattataaacgatgaacgagtttattataaattatggtggagtttattataaacggtgacatagtttattatagattcagaaagttcgtcagaatcttctctcccgtcttaccgcttttctccggatgaaactgggtggcataaaagttatctttatgcaaggcagcactaaacggatgaatataatcagtcgtagcggcagtaaagttgcaagtcggcacataaaagctatgcacgaagtagacaaattcttcttcggtaaatccttcaaagagtttgctattcgttttgccgattgtattccaccccatgtgcggcaccttatcttcgtgcctttgcggaacaaaacgtttcacatccacatcaaaaatattcaggcaatccactcctccttcttcagaataacggcacatcaactgcataccgagacaaattccgagcacaggctgacgcaggttctttatcagttcgtccaatcctgtcgctttcaagtggttcatggtagtttccgcctctcctactccggggaacattactttatcggccgactggagttcttctttatcggcagtaatcactgcttccacccccaaccgtttcaatgcataatccacagaacggatattgccggcattgtattttacgactgctactttcatcagctaaatattactgttttatttttataggccaaaactttacgttcaatgtgcttctgtaccgcacgcgagagaacgattttctccaagtcctttcctttgtttacaagatcttcaatagaatctttatgagtgatacgcactacatcctgttcgataatcggacctgcatccaactctgtcgttacgtaatggcttgttgcaccaataatcttcacacctctctggaaagcggcgtgatatggtttcgcaccgacgaacgcaggaaggaaagaatgatgaatattgattatcttattcggataagcattaatcatctgttcggaaatcacttgcatatagcgtgccagtacgataaatgtaattttatgtttggcaagcagttccatttccttacgctcctgttcttcttttgtctctttagtaatagggaacagatagaaaggaataccgaaacgttcggctacatgttgcaaatcggggtggttgcttattataagaggtatctccacattccactctccggctgtatagcgagccagcatatcaaaaagacaatgcgacagcttagaaacgaaaattgccatacgcggttttacatccgaaaaataaaggcggaaatccatttcgtacttttggccgtaaagtgttctgaaataatcttcaatcttttcctggggaaccagaaagtctttcaattcccattcaatacgcatgaagaagatgttttctacatggtctacatattgatccaaatagataatatttcctttgtttaccgtaataaagtctgtcacttccgcaaggattcccggtttgtcgggacagtgcaataacagtttggctgttgtcatcattctttttactaatttacgattcccggcagaatattttccacctttcttattttagtccgcaaaaataacgatttattgcaaaattacgaattattcaagcagaaagttgatataaaaacggtggtttcttacagatagaaagaaatcgggaactattttctatgaagaggatgacaaacttcaggatagtgacgctattgtcttcggataacgtcactatctcattataatggcgtcactatgacaaccggatagcgtcattatcctgagagaagaaaaaacaataatttttttcattacaaaagtactcaaaatgaggcactaaacgttcttctcgttttttcttgaaaaaaacttttctcaaaacgcttgcagatttacaaaaaacaactacctttgcacccgcaatcgagagagatgcagattaacaaaatgaaattctggtgcgttagttcagttggttagaatacatgcctgtcacgcatggggtcacgggttcgagtcccgtacgcaccgcttcttaagaaaaggaaaaagctctgtaaacattgaattacagagcttttttcttttatcactccctcctgcacacaccgagcacatcaaaagatattttcttttcatacataagtttatgatgccgtactaataaaggctataatggaaaatataacagaaaggttatacatcacatgagataataacaattaaataaaaacgttctacaatcaattaaatatagtatcttcgtacacgcaaaaagatagaagtttatatgaaagaagtaatatttgtaattctagaaggtttcgccgactgggaaggtgcatatatagctacatgtttgaatcagggagtcaagcccggaaatcctattagttataaagtgaaaactttatcaataaccaaagaacctgtaagttcaataggtggattcaaggtgctgcccgattacgggctcaacgatatgccggaaaattatgccggtttggtattaattggaggaatgaattggttctcacctctaggttaactaatagttccacttgtagaaaaagcagtaaaagagaataagttagttgccggaatatgcaatgcttctgtatttcttggtatgcatggttttcttaatgaggttaagcataccagcaatacactcgattatttaaaacagtatgccggagacaaatatacaggcgattccaactatatcaacaaacaggctgtaagagacggaaatattgtaactgccaacggaaccgggcaactggaattttgcaaggaaatattatatgcattagaagcggatacaaccgatgcgatagaagaaagttatctgttttacaaaaatggattctgcccggaaacataaaacgaatgaaagaatggccattcttaaaaaaagaaaatttaaacaatcagaatggttacaattgtactacgtctaagagaaataagtctgtatttatacatattattgcattgagcgatacaatttagtcgccaattcattgtttttttaaatcgctattcttttatacaatcttaaaaatagtacattgagactataaaagctctgtcactcaatttctcttatgtactatgagttctattctacgataaagctctccgatttgaaattactataaaacctaccggaagttgccgtaaatttcaatacacaatagtcggagtcggtaacaccttcgggataatacattatatcgccttcctgccatatcatctctttactgacactatcaaccaacacttccatggtaccgcgcaacattactccccgaaagaagcggttatcacaaaagtaaatacaggcatgactgttcttccgatattgtgcaacacgcattgacgaagtattcgttgtcagataaatcgtttttatcccttcccttttccggggttgcaacatggctttgatattgggaaatccttcgctgtctatggaaccgataaaggctgttttctgcttgtcaatcatggttcccaccgttttttctacatctctcatcatttaataatttaattggttattatttgatgcaaaagtaaggatattgagcagagccgatgcaataaaaagaaagggagaaatagtactttttacggtttatactttttacggtaaagcaagggagtttctcccgtatgctgccggaagcggcggataaaataagaaaccgttgaaaaatgaagctcaaacgcaatatccgatatcggagcgtctgtataagcaagtaatctcttagcctcatctatcactttattctgaatgtattgtttcgcactaacccccattaccgacgttatgatttcattcaggtaattgggagtgatgcaaagtttatccgcataaaactgaacggaatgttgttccttcaaatgggttccgaccaaatggatgaatctgtctatatgagtattattgatttctttatctgtggggatttcttcgtttgaaaccgccttctgatacgcccgctccaacagcattagaacttcatacagcaatgccctcaaaacatgcacgtcattatcattctgtttgtaagagtcaatctccgttttgatattgtgtaatacttgaaggacacgtgtataaagttcgtctggaagatgcagtttggctgatgtcttttccggtttgaaaaacgcaagatgccggacaaacatggaatctctaaggagggaagataaaaactcatcctcaaaaatcaaggcatatccatttgttatatgacgcgtatcccagttccgaatctctcccgccttagaaaaaaacacatcttgagggaaagcttcataagtacggttgtcaatggaaaagctcccctctccttccgttataaaagtaatgtcataataagtcaatgtatggacggaactttcagtcaggaacttcttcacatatttcagttcgacgacatcaatcaaaagttcactgccatacttattcttgtgaaaagtatatcggggtatcgagttcttcattatgaagtacaaaaataatattccttatcaaataatccaaggcttttccactttagagagaaatggaaacaataatagactatctgataaggaatatctttaaaagtatagataactaaacgctttcttatttctgacttcccgccaaatactcaaaacagagtttcttcaaataagcttccatacaaattgattttagttaatatatgtcacttagaaaacacttaattcgatatagcaggcatcgcagtgcctttcgagtacattctcttttggttatatcgcaaataccaaatacaaatcaacaacgaagccaccgtcgacaagggcggagcaaagcccatgaggaacagcgaggaactgtctatctgactgaaccagtacgacaacggaatacggaacaggaaggtcgctatcagactgtgaatcatcgggaacaatgaattcccctgtccgctgaagtaagaattgatgcaaaacacaaaacttacaatgatacagtcgatactatacccccgcagatactccgccgccattgtcaccaccgccacatctttggaaaagaatgcggtaagcgtctccggcaggaattgggaatacacacaaaccgatacaccgaaaacaagggcaatcccaatgcccgaagccaggcatttgttcatccgctgtatcagtcccgcaccgtaattctgtgccgtcatggttgccactgccgatgatatcgccattggcggcagcatcgcaaagacgatgattttctccacaacacccaaagacgccgatgcgatgactcccatttggttgacaatgaccgttataatcaagaatgaaatattgattaacgcgtcctgcaatgcaatgggtgctcccagcaccataatctttttggataagttcttgttaagccggatatctttccgagtaaactcgaaatggaatccatgcccgtgcaagaaccaaagcgaaataacaaaactgcccccctgtgctgttattgtagccaatgcggctcccgtagcccccaaatggaaatagccgaccaagataaagtcgaggacaatattaatcacgcacgccaatcctacaaaataaagcggtgttttggagtcgcccagtccacgcaggataccacacactacgttgtacccaataatgaataaaatacctgtcgagcataccagaatataacttttcgtatcagccattgcttccgcaggcgtatgcatcagttcggctatctgcccgtgaaacacgaccatgactaaagtcagcaaaacacctacgattgaaaacagccatacggaagaaccgattgtagatgccactttcctattatcctttgctccggtggcaatagcaatcagcacggttgtccccgttgtaatgccaaggatgatacctgtaatcgtctgcatcacctggctgccgatagctacagccgccacactggcagaatcatcgtattgccctacaacaaacaagtccgccccaccataaagtgcctgaagcacgttggcaataaggaaaggtactgcaaattgcagcaatactttcggaacgctcccctgtgtcaaattcaactctttcatagtttcttcgatactttacctcttatcttaaattgttacaataaaaaaatagtgccggacaagcgaatgatttgcaccattcatcttatccggcactataattatctattatagcaccctccgatgaggatttttatgcctgcccctgttttcgggctgcaaatatgggctttgttttcataactaccaaattatagctgcactttatttttcaggatacaatcgggtatcaatgtgataccaatttcaacccgataatggagcaaatcagtgtgaagataaagaacaaccgtcccacacttgcaggttctttaaagaagaaaataccgattaataccgtgcccgccgcaccgatgcctgtccatatcgcataagccgtaccaaccggcaatgtcttggtcacctttatcagaagcagcatactcacacataaggataccaagagtacgaatgaccacacatatttttccattccgaataccctgtttatctttcccaggcagaaagtaaacaccagctcaaggcaacctgccaaaatcaaaagaatccaattcataacatttttttatttgcaaaggtcatgaatttccggcagcctctattttacatttgtaaaaaagggattttacatttgataaaaaatcatcttatcttcgcccttattctgctcagactaacttgggagattcccagataggaagcgataatacctaatggtacacgttgaagtatatcggggtaatcagcaatcaaatcctgatagcgttccaatgaggtcttgaactgccgtgatataaatagctgttctgatttgatacactccctttcggcaaacttccgcccccagttggctatatgtatatccgccagataaaggtcgtgcagtttgtcgacactcaattcatacagcacactgtcttccaataattctatattctcatatcccgcctgattattgtaaagggtctgcaaagggaaaatagcgtcgccctcctttccgaaccagaatgtcactttcttgtccgatttataggtatatgcatgcaacattcctttcttcatcagatagaatttggaacttttacggtttgccagaaacaggtggaaacctttaggataggttacttccggtgtttcattcaatagggcttccttggatgcaagcggcagtttgtaaatattatcaatgatgtcatagatgtccatatccatagattctttatttcatttgtttggcaactctgttcagaatggaacgcatgatcgttttatggaaaggacgaataaagaagaagtagaatcgtcaatacttcgggagtaaccactttatcactcactattgtttttgaaaaagaatcacagtaatccgccggaaggtaattggtgatgagacttccctcacatatgttgttttgtactttcataacttgatgcgtttttagataacgtaggctgcgaaaataatcactttaaattgatatacaataactttatctgcttttctattcgcggaaacggaagaaagcaggcaggcggtcgggattcaacgtgtagcgggcatgttctgtcaaaaacggttcggagttcatcactgcacaagaatggggtactgccgacatcatttcccaatccttctgcgagttgccgacaatcaatacttgctccagagggaaagctaaaactttacatatatggagtactcctttctttttgccggcttccttatgtacaactgtgataaggggtggcttataaaatacctgataaggttttgctttcaatcgggaaagaatgttctccctctgttctttctcataaaccagcatgctatacttatagacttggccttcatagctatgcgccgttatctttgcggattccccgtttacatccggtagtaattcaaccgataaacatcggttccgcccgtcatacaacaataatccaccgtctgcaaatgccccacctttgaacaaactgaaaagagtcttacctaattttctccgcgcctgttccactgataaagaagtagccagatataatgggacagattgcgccatatagtgtaagacattggcatagttttccggaacttttccttgtgcatcggtcaatgttccgtccacatcgaaaaaaacggcagtaatcaagggcttatccggtatccgccaaaatgtacctttgcccattatagaatgcaaaggatgattagtcagattactgaaagcaatgtaacaatcacaaactttccgctgacaagaaagcgaagtgtctagcttttgattccgataaagattgcctatcttcaccttacttctaggacaggcaaagatatcccctttccagtcaatgaagcaagcacttcttccgcctgagcaattctcccattgagccggagcgttttgcaaatcatactcgaaaagattatccagttgagtaaaaaaacgaacatcttcgttgctcaatggagactttaacccctgcatggcattaataaacagataaatatccggtgaaagagtatttcgcaaatcagcaagtatattttttgccaacgggttaccgacagctccggcacaaacctgtattcctgcattatggagcgtatgaagttgccggacaaatttctctactgaagtcatttccggatgaaagctagcccaaacttttatcttatttatcaatgccggagcagtccggagttcgttcagccattcatcggcaggaaaagaaagattagtctgacaggaaattccggtaacttgcggcaatgacgcaagctgtatgattccttccctataatagcgatgtatgagtgcttcaccatagggaatgacaaatagttgcaaagtctctccttcccattgctcaatagcggtaataaaacgactccatgcctgcttgtcccgcattttagatgcaggatgagacttcttgccgaaaggacaataagaacaagtgtaattacaaccattcaatttgctccgatagtatatacatcggacggaaagtaaagaaccctcgtttgtcatttcattcaaatatcatttaaacttcactcaaatttcattcaataggaataagtctccattaattgcctgattcccggagtgataaatagctgaccgatataatcggaataactaagtccttcgggagtcagccggatacgttcaggagtttcctctatccagtactgttccgccaattggcggaacaacggagtcctatcaagcggctctccaaaacgccgagtatattcagccttgtcaatccccatatagtacatcagattcttgatgataaaacgttgttgttgttcctttgcggaaaggataaatccgttacgggctacggtgaaatcagtggttgccatatattcgtctatctcgcgggcaatgcattgctgacagactgtataccgggtagcatagtgtaaatcacccaaatagctgcgtccacccgacccacacgaaagcattacttcatcgccacatgagacttccgcgtcagtggacggatgatgaatgaaacgccgcatggatgtttgcagaaagccttttgcttgcaataacttgcaagcggcacgatacattcgaaaacagacatcatctggttcccgttcggtaatacctgtaccctgacgtacatatagcggataaataaacagttcgttcggctggaaccggagcgcttcttccagtgaatagaggaaactttctaccgtctgtcccttaataccataaatcaagtcgatattgaaatagggaaaatccatttggcggatatcgtctaatgcttgataaatagtgttttgccggggacgccttttgatagctttcagttcttcatcttgaaaactctgtatgccgatacttacgcgagatactcccgcctttttcaagacattgagacgcggacgatctgcatattccggtgaagtctctacggaagtaaaggcatgggacggatgcacgccgaacaaagcggcggtagccattagttgttccagttgcggaacagtcagtagcaacggagtaccgccgccgatggcaaagctatcaaacgtcagtccggcagtgagcggtgagagttgttgcgcctgtctgtgaagggtgtccagataagtggcgatatattctgtacggttcgtttgcaaagagaataagttgcagtatccgcatttatggctacaaaaagggatatgaaagtagagtgacgcctttctgccttgcagttgctccaaatatgggagcaacgaaaccggagcaggaaaaggacggtacgccgttttatgcggataactatacatatagtctacatatcgggatagaggttgattcattgtttcgtcaggataaagtgtttgtaaggaaccgtgtagactgtttcgtgggatatgcagtgatattcgtagccgtcttcaccatagcaggtgccgtggtcggaaagggcaatcaccagtgtgtcggcacgcttctgaaaaacttcaaacaaacggggcaactgactgtcgatatatctcaatgccgccgcgtgcgattccttatcgtctttcgttttacctttcacatagtgacagttcgggtaatggatagcggaaaagttgatatacatgaatatacgtttgtccgcagagtaattctccagtttcttcaaggcaaaatcaatctgcttctccgtactgtcaggagccgtacagccaaagatcggcagccagtaacttttcgtaaaataaccgggaaacacacgtcccagttcattgcgtttgctgaagaaattcacgccgcctatgcagattgtctcatatcccttattggcaaggctctgcacgaaagtagcttccgtaaacggataactgcctttgggcgggatacgccccgtccctgcctgcacagggaaaaacagccatttacggctacgcaaggaatgaggctctgccggtgaaggaagaaagcctgcaaaaatagcaaaatgagagggataagtaaaatttcccggcgcatgccttttctcccacaaaccaccgtgactgttcagaaccggtgtccctccggcggcttcttccgctttactcacatcgtagcgcaacgtatcgaagcaaagcataagtatatcatgtgtccctaccacccggttcatatccatatcaggacactggttttgttctccagcgggcagttcatctatctgcatggtcatatttcttttttattgttcttatctgtcgggtataaatagaattgtgagcgtacatatcctggtaaatgtggtcgccttgtccgttgacctcaataatataaggagtatccgttcctctttctatcagtacatctactccgccatatcgcaaacccagtgtgcggacggctttcctgcataagaggtaaatccgttgacggacatcttctgacaagggaagttcgctccacaggcgtgcgttgttgttcaggtgcagattggttataccccccttgctacatctgactaccacatagtcaatctcttcctctccacatactacccgaaggtcataattctctccctgcaactgctccttaggtatccattcttccaaaatagccccggtatgcatgaccgcttccgccaatggaagaatatcttgctccttagtcagacgatgaatacgttttgtattatggatgattccgtccaccttttgcaaggtagtataaaccacccatttcttctgacgcggctgatagcggattgccataatgccgcctgctcccgaaccataacggggttttagaaaacaacccctgctacaaccggaaagcgcttgcaccagttcatcgaaagaatgtggagcagccaacatcggagtcgcactcaagtcattggctgataaaatcagtttggtttcttttttatcaagagcctgcaataatgaatgaggcggattcaagaaatgcacatcgtcaggcagtgccgtttcgtccaaccgctgtaatactgttttatattcttcactcaacagggcatatttcagaaaatccgtttcgcagcttacccacggttccagtttgacaactgcctgccgcaatgatggcaggcaattgaacaattcttcgtaagtcataaagcggactcccgtctgcaagctcctgccggcttcgacaaagtattcgatgcgtttggacggagagttgctgacaacgattatctgcatttcccctactccgtaatcatcgggtaataccacatttcaccgtcgtcctcatcagcttcttccgattctgcaatatcaatcttcatcggaagttcctgcaacttcttcttcatgcccttgctcaaataattgtagcgcatattaataaacttcaaatgggcaatcttgtccatattgtccagcaagagttgggcaccttcatctttgaggacacctgccgaaatatccattgtctccaattgaggaaggatatccgactccaggaacatttttacaatctcatcctgttcttccgagttcacgatgccaagataagtcaatttcgggaaacgcgtcttagagaaaagcggacggaatatttcaatatcagcttcaaagccgtagtcttccacgccgacatacagaaccagtttttccagattcggaaaatcggacgccagaatatcctctacgacttccgtaggaagaccgccactgataatctccagtgaacgcaattccggacgtgaggtttgtcccaggcgcaggcaattcgtaccttttattttcaagtctttcaatttgggcatagcgtcgagcaacgggctgaggtctgcctgttcaatccaggagatctcctgttcttcctgatcgatatctccccaaaacaagccttcaatgtgtgcaaatttatctttattttcgagtattcctttcagtaaatcggagcaatcttcaccttcatagtcccaacaaccgatagtgatttgtttatattcgggcagatgcttgtctttcagaatcttatccaatagccggacatcgttttcgtattcatcataactcaaagtgtatttcttggcttccactttcatctcgcgtgccgtttcctctgctgtttccacatagcctttctttgttttctccgcaataagtttattggcagctttttcggcttcttcagcagtcgagtagtttttgacttgtgtctgaccgtctgttcccaatttgccatagttaacggttacgtctgttccaactacatctatactccagaatttctgtgacttaaagtcttgaaatacgaatactcttttcataatactttttttaatggttgatatttgcccattcaaagcgcaagaacgcatgaacgacgtctgcaaaaataattatttttcgccacgtacaaagcaatcgtacactaaactttcaaaactagaaaatacaaacaagaagggctgcccccgttttccggagcagcccttactattcagtttctatacttctgtattaatcttcaatagtacatatacttacgcggttccaatccggttcggtaaacatgtcacctacgccctgaccttcggcagtgatacgggaagcgttaatcttgtatttattgaccaggatagtcttgacagcttccgcacgtgcggcagctattctagcattgacttccacacttccttccggagaagcgtatcctttgataatcacttttgaatcaggatatttcttcatgtaggaagctacacgttccacattcggcaactgtgacgcgtctactgatgaacgaccttgtctgaaagtaatgatagattccggaacgcgagcggttttgactactgtttcaacaggaactacctttgtacgacattcttccaagtctttctgcaagccgttgatttgccggttggcagtgttcaactcaccgtccttattgttcacttcagaacgaagagcattgattgaagagttcagcccgtcgatttccgcctggttgtagacttttactttggtgaaataatggtttccggtacttgtcttgaagtgataagtcaatcctgcagtcagttcaaacgctgcattattcgcattgaaacggctctttgtttcgggaaagctaccttgcatatcatatacgatagcaggtttgattcccaatgtccatgctttcgtttcaccaagattgaaattgaagttcaatccgaaacgggtagaccatgagttctgatctccgtcaccatttacataataatgcaaccagcccattccggctactgcttctacttcaaacaaacgaggctcgccttgataacttgcaaacaggttcatcaaattgactttacccaataaactgacatccgaagcatcgaaggccgttttactcggagtggtgttgatgtatcccattccctggaatcccaaaccaaagataggagtcaattgttttgagaaccctactccaaaaccgggacgcatactcttaaagaaagcgctatgagtaagaggagtgattgctcccgcatttacttcaacagaccagttgtctgtgaactttgtaccttctactactgattgggcgtttgctgtaaatgcacccaatacaaaagctaataaaataatagattttttcataatcaaatgtttttaaactgtgatgttttgcttgctaaatcattagaaatgttttatgtgttccatgtctaattctttagtttataatcaaattcgttattcacagtaaacaacatatcatataaaagattagttcacagaatgagactccaattaacaactatttaatatttggggactcctgccaaaaagtgggaaatatgcattcaaagtctatttgtaagatttaatcgtctgactataatgtcaattattatcaccacaaatgataaagttcccacccttaagaaaaaggtaatacaaaaaaggcaacaacttactacttgaacgttgattgagttattaataaatactgcgaccgtttattataaacgtcccctccgtttattataaactttaaaatccggatttgcgaatttagcatcaataatatgcaacaaaaaaaggctgcaaactctgtaaagtttgcaacctttggggtatatctgccgttctatcctttagtataagctaagggaatgagctaagttcgttgtaatattatactattttctatccattctatactcatatttcagttattctttcatccataattcattgatttcattcttttcctgactacaaatatacgaaataaaaaagcgtttgtcaagtcccggataagttttaatcgcctgtcatcaggaatgctctttttttacttttccggaatcacttcattcagacaggctatggcattgagtgtacgcggatagccgatgtagggcaatagttgtgtgacgacagccagcaacgtatctttattattccctacgttgacatttccctgtatgtgtccttttacttgtgactcacaaccgcctaaggaaacaagaatagagaacgtaaccaattcacgtgtcttcacattcagtccgctacgtgtctgatagtctccgaagcaattggcggagagataacgctggatatgcttctgattctcgggagcgcttttatgcatctgttctatccgttcaccgaaaatggatttctgcaactccagccctttgtcgaaacgggtttcggatgacacaaccgattgtccctctaaaggaaggcgtacgccacgggcgagcaatataccattagtaagaccgataaaatctctcaccttagccatgcctgcataagctactgcctgataaaggatttccttcacttctatcggggtaatgccttcattaagagcgttttcaagtgtgatacggtattcagcctgtgcctgcgaagctatattggatgccaaggttaccataaggcgggttttagtatccaagtcaccatattcctgcacttcttttgtaaaattactaaatattccgtccaattcggggtcggtagcttttagtccggttgccacgttgtcttttgtagcttcggcatattgttggtcgctcacacgttccagccacatattcttgttggtttgcggattacattcgatagccagatgcgagaaccagctatcgggggcggcaccgtgccaatgttctatgttcggagcgatttcaaccacatcaccgggaagcaagcggcgtgacgccttaccacgttcctgataatatcctacaccaccgacagcaatcaggatttgtccacccgtatggctgtgccagttattgcggcaaccgggttcaaaagtaacgttggacatggggacattcaagtctttgttactagtcagtcgcgccagccaggattcccccgtaaaatattgtttgaatcctacattctcctctcctatcggaaatgcgctgatgttttgaggtacttcttcttttttcatattctgtgcatttaatgaattatatccgaaaaacgttattaatgcaactactaaagtaacaattaatttcttcatgttcatagtctaattgttttaaaattaataacacaaaaatacgaagttatagccttacaagactgatacaaattacagaagttagtaccattattacagatttcccgtcttacctattcgagcgattctgactttccatattacttctttttattcgtatttacagggagtgagaaggaggtactctcaataaattgacaattattttattatttcaaagcccgcctcaatctgtttaatccttctatcaactgctgtcgcggacaggcgatattaatacggataaatccttcaccagcctctccgtacaagctgccctcgtttacccaaagtttttctttctccaacaaggttttcactatctcatccgatgactgattcagcactgaacagtccacccaaaccagataagtgccttccaacatcgacactggaaattcagaaagatattcagcgaagtatgccctcaaataattgtaattggcgaacaggtattgtttcagctcttccaaccattcctcactgtcgttataggctgccattaacgcttccaccccgaacgggttcacatcacaaatttcattgacattgattgctttatctattttcgttcgtatatccgtatcggcagaaatgatattagcaatctgaagccctgccaggttaaaggctttgctgggcgaggtacaagtgacggagtgcatcaggaattcttgtgagatagaagcaaaaggaatataggtgtgtcccggaaagacaagttcgcaatggatttcgtctgctactacccacacattgtttcggatacagatgtcaccgatgcgggtaagttcctgttttgtccatacccttccggcaggattatgcgggttgcataacaatagaacctttacatttgggtcggcagctttttgttccaaatccgcaaaatctatctgataggttccatttctataaatcagcggattggcaatcatcccgcatccgttattgcggatagaggaaaaaaagcagttatatacgggtgtctgtaccattactttatctccggggactgtcagtgccttaatgacagcagacaatgccggtactactcccgtggtataaataatccattctttttctatctgccagtcatgtcgccttgcaaaccagtttgtcaccgccgcgtagtatgcatccggtacacggacatatccgaagataccatgctccacccgtttcctcaacgcttccacaacagggggagccgtacggaaatccatatcggctacccacatcggcaatatatctgcatctctggcagaatcccatttataggaattcgtacctcggcgtggaattatttcatcgaagtcgtacttcatatttcaatcaaaacaagtcagttcgtcccaaagtttcaattcacaatttcccggtgctttgagattctcgtccaggatgattgtcccgaaactttcggcaataatgctccccgtgcggggattcttcacgctgtgaatcgggcttttaatcgttgctttcacactgctgtgttcaaaagcgaggtcagcgtcctccgccattgtacaattttccatgaccagatcatgtgcatagcaaagtggctgtgtgcccgaaatcctgcaatttaccagacgcaagtttttagaatgccagcccagatattctccgttcagttcggaatcatagacagttacattctccgtattccagaatgcatctttggagttgataaccgcattacggatttccacgttcttacagtactggaatgaatagtttccattttgagcgtagtgctgtatcttgatattctcgctatgtataaaaagataatcagctttgtctatctgcacgttcttcaaatctatattacggcaataccaaaatgtttccaaagcgttgggcaactgtacattttcgagttttatcccgtccatttcgcgaaacatcttcggggcttctaccaaggtatctgccatttgcagactttgggaataccacagcgcggcacgggcgccttctgtaaagagacagttcttcactataaatccattggtatgccaaaagggatattttccttcaaagcgacagttgattgctatgatgttactacattctttcagtgcggattcaccagcgtgaatcgtcacatcttccagttgaaggtcgtgggttgcgaacagaggacgttcgcctccgtattcttgatttcttatttgttccattagtttattttttagtctgttatttcaaaagtcacatttacatttcctgttatcacaagaaaactacttatttcttcagatactccttgaagaaagattccagtttgctgaatggtataaggcttacacggtcgtaaaggtctacgtgtcctgcaccgggcactatatacagttctttaggctcggcagccagtcgataggcatcctcgctgaattcacgcgaatgggcattttctccggtaatgaaaagcatgggacggggtgaaatcgtttcaatatctgcgaaaggatagaaattcataaatttcacattacttgaaagggttggatgagttgttgtcaaaggagttgctccttctggtgtgaattctcctctttgtgtacggtagaattcataaaattcacgttctatcgggccggatttttctgtcagttcatgcactgtaccacctgtgtattttgtttctccacctaggaattcaacataacgctgctctgccgcttccgccataatttgttttctctgctccagggtcaatgcatgtttcaatccattacgactggcagtacccatattatacatgctgattgttacaatggctttgagacgaggatctatttttgccgcactgatagcgaaacttccactgccgcaaataccgattacaccaattagattccggtcgacaaacggacgtgtaccgagaaaatctaccgcagcgctaaagtcttccgcataaacttccggcagaacggcattacgcggctcaccttcgctcccaccccaaaaagaaaggtctatggagagtgtgacaaaaccccgctccgccattttagttgcgtaaaggttcgcactctgttccttgactgctcccatagggtgtccgacaatgattgcagggtatctgtctccttctttcatgttcttaggcagaaacagatttccggctaccttcattttatactggttggaaaaagaaactttcttcacacttaccaaatcacttttataaaagttatctgcatctgtctgtgcagaagaaaaattagttccgagcatcataataaatacagctgttaataataaaatccgtttcatatctcttgcgttttaataattaaataattgattatctattttctacgttgcaaaaatagggtgaaataaagagactgtatgtagatgaattactgacattattacccgaattacagattctgttttttatcaatctgctataatatctattctaacctatttaaggaatgaagtaagtatcaaaaccagagaagccaaagtcaaacttcctgcttttgcgaacgccaagtttattaggagaagtaactaaagaatcattaaacaaaataagaaaagtcgaaactaaaaaccaatatatatattatctactatttttaggtttatcatcagtcacattttccaaggtcggtaatataggtaaaataatccgtaatctatatacaaaccgaatctaaaatcagcagtatctttgcagtgtgataaagataataggtataaacgtaaaaaaacaaattgatatgtatttagaaaatatttactctcctgcagacgtaaagaagttatcgtttcaagaactcaacgatttaagtaatgaaatccgtgcatcactcctgcaaaagttgagtgaacacggcgggcatttcggacctaattttggaatggtggaagcgactatcgctttacattatgtattcaattcaccggaagataagattgtttttgatgtatcgcatcagagttatgtgcataagatgctgaccggacggaaagatgctttcctctatccggcagagtatgacaacgtatccggttattccgagccacatgaaagtaagcatgatttttttgttatcggtcacacttccacttccgtcagcctggctagcggattggcgaaaggacgcgacctgaccggcggtaatgagaatatcatagccgtgataggcgacggatctttaagtggcggcgaagcattcgaaggattggactatgtggcggagcttggtacaaacatgattattattgtcaacgacaatcaaatgtctattgccgagaatcacggtggtctttacaagaacctgaaagatttgcgtgacagcaacggtcagtgcgaatgtaatttcttcaaggctatgggattggattatatgtacgtgaacgacggcaataatgtggaagcattggttgaggctttctctaaagtgaaagatattcagcatccgatagtagtacatattaataccctgaaaggcaaagggtatgaacgcgcagaactggacaaagagacttaccattggcgtactccgttcaatatagaaaccggagaatccaagtttggcgaaactgcggaagattatagcgaagtaaccgctcaatatctgctgaaaaaaatgaaagaagacaagcgggtggtaacaattacttcgggtactcctgccgttctcgggtttactcccgaccgtcgtcaggaagccggcaagcagtttgttgatgtcggtattgccgaagaacatgcagtggcacttgcttccggtattgccgctaatgggggaaagcctgtttatggggtatatagcacatttatccaacgatcttacgaccagctatcgcaagacctctgcatcaataataatccggcagtcctcttggtattttggggaacattatccggtatgaatgatgtaactcatctctgtttcttcgatattccgcttatcagtaatattccgaatatggtctatttggcaccaaccagcaaagaggaatatcttgccatgctggaatggagtatccgtcagaatgaacacccggtggctatccgtgtgcccgcaacagatgtgattagctgtggcgagtctgtggaatccgattacagcgttctcaatcgttataaagtcgctcatcgcggttcgaaagtagctatccttgcgttaggttcgttcttcggattaggacagtcggtgctgtcattgctgaaagaaaaggcaggtattgatgcaacgcttatcaatccccgatatatcaccggcattgacaatgagctaatggaagaactgaaagccgaccaccaactagtgattacattggaagacggtgtgttggacggtggtttcggtgaaaagattgcccgttattacggtgccagtgatatgaaagtccttaattatggagcgaagaaagaattcgtagaccggtacgacatacaagagttacttcgtgccaatcatctgacagatgaactgattgtagaagatatcagaaagattatcggctaaagaagtcctaaccagttcattatatattcatgtaggttgatgcacttccgtaacgggggatatgcatcaacctacttctatttactatctattctgactgtctatctctttaagcaattcgtcaacagccgttttcagttgcatatcttcccctttcactaccgtttcagggctattggcaaccttaatatcaggctctaactggctattttccagataacttccatccggcagacgataaccgattataggaataccgaataccagtgaagggtcttgcaatgtttcccaagatacgcttgtcattgttcccggcacaggcataccgaccagtttgcctatcttctggtgtttgtacacccaaggcgtaccgtgcgcattggaatagttagcttcacactgcaacatgatagaaggtttattccagcgacggctcggcatatcacaggcttcgcgtccgcgtactacctgcgtaaagtatttctgaccgctgaaaagtatctcgatatcttcgtgcagacgaccgccgccattgaaacgggtatcaatcacaattccgtcacagttgttatatttacccaaaatatccgagtaaacagtacggaaacttccgtcgcccatggactggatatgtacataccccaaccggccgttcgaccatttctcaacatcggcagcacgttgttttacccaacgtttgtataacaaaccgttgagtcttccgctagtgataggcattaccacttcttcccaacgctccttattctgcggattatacaacgaaaccagggttttctttccggctttattattcagtaaagcagtaatatccttatccggagccagttcctcaccgttaatcttttcaataatgcagcctgcttttacttttgtacgggaatggtcgaacgggcctttctcgattacctcagcgattttcattcctttttcctggtaattccaatcgaacaacaagcccagattagaggtcacatctcccccgcctcttggagaataacgtcctcccgtatgcgagacattcagttcgcccaaccattcgctcagtaattccgcgaagtcgtagttgttatcaatatgaggcaggaacttgcggtaagcagccgtcatggcatcccaatcgaccccatgcatagtaagattgtagaagcgtttttgatgttgcttgtacacatggtcgaacattgcttcacgctcggcagccaagtccattttcatttcagcctgataactgattgatttcaatgcatccgacttcgcatccattttctgcatcatccggcttcccaacaagaaaatgtcccctttcttatccaacatcaatgatgcccaaccggtattgagtttgtgcaaacgttttgtgtctttttcacgaagattcattttccaaaggtcatagccgccttcgaaagctgagaagtaataaagattctctccgtcttttgagagtatggcactgcctaaatcggaagagttgggagtcagacggacgatacggtcttcaatgccgttaatctctactactatatctttcttgtctgctttatcttcggatgacttgtcctcgtcagcttcatcctttttggacttatttacatctttcttcttgtcaccgtctttcgctttcttctgttccttttctaattctttgagcagttcgaagtcttccttgcttaagcgatagcggtcataagcatcctgattcaagaataccagcatcacatcctgttgtgaaccccaagaagcatgcgcacgcataccgtaacgttcagtttggaaaagaatagcgtttccgtccagtacccaacgcggagaaccgctaatatatccgctgttagtcaagttggtaatagtaccgccttgtgcgctgacaatacctatatccgaataaggatcatggcgattgccaataaattcaagagtaaaccatttgccgtccggcgaccattcatagtcgaatccgcctccggtattataccatgtagaaccgtccgtcacttgacgaactttcttcgtctttaagtcaagtaccattaagcggttacggtcttcgatgaaagccagctccttaccgtccggagaatattgcggataagcacgttccactgtttttgaaggaagcaagacttcttcctcgataagagttgcattagggaaattggcttcttccttacgggctattttggcggtgtaaagttgccagttacccgtcctttcactggcatagaccagcgtccggttatccggggcaaaggacacagcggcttcttttcccggagtattcgtgatttgctttgttgtagtgtaatccgtcgaagtgacaaagacatcaccacgcacaatgaaagcaacctgtttgccgtccggagatacggaagcggaagtagcgccctgagaaaatttgagggaagcaatctccttttcatcatcccggacaagttcgacgtttactttcttcggacgggcattggcttcctgtgtataaagctctccgtcataggtataacacaatgtacctttatcgctgattgacaagaaacgtaccggatgcgtacggaatgtagttaccgcttttacctcttgaggcagattcgacgtttgcgaagtattcagtgaaaagttataaacattgaatgagccaccgttgcgctcgctaagaaaatagacagaattgccgtcgggcgcatacaccggattgcggtcttccccttcccggttcgttagattggtatgttttcccgattgtgtgttatacagccaaatatctctggttatagaagaagtatggtgttttctccattcatcttcgaagcctttacggtcttgataaagaaagtttttccccgatttatcaaagcaaacccattcggcaggagtagcgagtacttgctcggtacgtcctccgtcagcaggtactttatacaattccgtcattgctccggtaggaaacaaagcgctacctgcggggtcttgaatagatgcggagaaaagtacaaactttccgtccggagtaaaagccgaaggaatctccgaagcggaatgataagtcagcctttgggcggttccgccgtcagcaggcatgataaagaggtcgaaattcccattccggtcgctggcaaatgcaatttgttttccgtcgggcgaccaaacggggttagcttcataagatgcttgtgttgtcaactgaacggctgtcccaccctgtgcggggactttgtaaatatcgcctttataacaaaagacaatctccgttccattcggtgaaatacgtgcgtcacgcatccacaaaggagtaatggcatagccggacaatgcggtcaatgccagtgctaaagaagttattagtttcttcatatcaaattattatatatattttatttcaacaaatcagtttgaattagttttcccgtgtaattatagaataccctgtcaccaaagtctttgtagaagaaagcatatttatctactcctgtacaatggcagacaccaatctgacgcggcagatattctttcagataatctgcaatgatctgatatttccgttcttctgcgttatgaatatgaaaaccgcctaacagtaagttacaaggagattcgggaaatgccgcacggactgttcgcaggatatttgtaattcctcgatgagaacaggcgctcaatacagaaaaaccgtccggctctaccaacactaccgccaattcatcctgaaaagtatccggtatatggcaaccatcttctttctgaacccgaaagcgttcgaaatgggtatcctcacggtcgataatatcaatagagggaaagagaaatacgccgggaagcagttcggtctgttcttcgataaaacggaaacgggaaaggtcgaaagtctgcgtatgcttcattccattttcgcgttcatccttaaattttggagagaaggcttcgcgtttgcagacaactgttgcttgtttgttcagctccaagaaatgacgcagacctcccgtgtggtcactgtgcccgtgggataatatcagataatcgactttctgcaagtcaatatgcagcaggcgggcgttacggataaacaaatcggacgctcccgtatcaaagagtaatctatgtcccgatgtctcaatatagagagaaagaccgtgctctgcctgcaatttacgtccatagacacaattctctacaagagtcgttattgtatagcccatgatgcttagttattaaacgaatcatacaaaataaaaagttctgccacaaaattataataattctgtggcagaacaagcaatccagtcaattaaaattcttgacttttcaatctattcgattgaaatatcatttttatgcttcaaaaggtcacataagatagcgtcactatccggtcgtcatagcgtcactatcttgttgttatagcgtcactatcctgcaagcatagcgtcactataataagccagtgacagttataccatttttcccatgttgtaggcttcctgcatgtatggagtatctttaatctcccctaccttccaggcgccgattccatagaccgttcctttttcctgtggcccttccagacaatcgaggaagccacggaaaccgtctattgtacgttccatcattgccttattatcctctgccgccgcaataatgaaataaaactccttgttcgttatctccgtatagcgtgcgcagcaacggtcaatcataatcttcatctgtccgcacatcgtatagaaataaacaggagttgccattacaatcacatcggcagcaatcatcttctccacgatttccgccgcatcatccttctgcggacaaggctttccgtacatactgcaaacactgcatcccgtacaaggatgaaccgttttgtctttcaatacaatcttttccacttcattgcccgcttcgagagcacctttcataaattcatcacaaagcaaatccgaattgccgcctttccgcggactggacgaaattatcagaacttttttagccataactttactttattagttttatcttttagaatgattcagtcttttcactctgcaaaaataggcaatttataacatagcgaatgtatataaattacagagagatgtaccttaattacagattaccagacattcctgtgaatcctatcccctacccggatttctttctgcttacaaatatgtgcattctccgctgcatagccaatagcgagaaaacaggcaaactcatatccgtcaggagcattgacgagatgtttcacatactccggttcgttgccaataggaatacggaatgcacacgccagtccttccgccgttgctgctaacaggatattctcaacggctgcccatgcagaagcgaaatagttaagtgaactttggtcggcaggttggcacagaggaaaatccttttgccgaaaaaatggaagtacgagacaattactttgcataagcatacgttgttgtttgggcaacgcatcgacaaacatggcgtgttcatccttatccatcatgtcggcagcagcatcaagccctgtctgctgaatgttcttggtgttttccgccacaggcgatatgagtcgggcaatgttttcctgccctctcacgacaataaactcaaactgtcgcaaatggtcattagtcggagccttgaatgcagccgacaataccttctccaacacttcatccgtcaccttcttatcggaaaagtcgcgaatagttcttcttttctctagtacttgatagaaatccataacaatacattttaatagttatacttattgtttccggcagcaaagttacccagctttcttgttatatatttgtggtatcatcttagatatttgtcgtatatttgcatataagtcattttaagcattacttttatggaagataccgccattccttatgaattgcccgaagtggagaatcactcttttttctttatagaccaacgagtgacaacaagcatcgaagccaaactgcaccggcatgatgcatgggagttgtattatgttgtccacggatatggcaaacgaatggcaggcgacacactacaccctttcgcagcaggtgatgtggcgttaataccgccgtccatgctacaccgctgggagtattcgccggattcagcagacgatgacgggtatgtccgttatttaatggtcgctttcagccattcgcttgtagaacggtgtatggcagtattccccgaactacgtaatcgtctgacgggcattacattcccgacgaacgctctgaaattcggtattggaagttcacaaagcattcgccggatattgtcacggatgaacgatatggacgagttgggacgcctatgcgaaatgtttcgtctgctacctgtcatctttacctcatccgaccatacccttgccggaaagcccatgagtattgaacgtgacgtgagacgtatgcagcaaatctgtgcttatgtaatggctcactatatccataccatatctttggatgatattgccgcagaagtaggcatgaaccgctctgctttctgttcctacttcaaacgttgcaaaggaatgaccttctcgcagtatgtaacccaatatcgcttaaatacagcctgcgaacttcttaaacattcacaaaagcaagtatccgaaatttgttttacggtcggctttaatgatttgccccatttcgtccggattttcacaaacaccttgggagtatctccgtccaaatacagaagacaatttcaatagtcatctctttgactgttttgcattcaagctattttaatgccatttctccccttttattcgtttattacggagattttcagtaagtttgtccacgatacgaacaacatgatgcaatgaaaaaaatacaactgaccgacacacataaagaaaagctgttccaaatccctcttttccgggatttgcccttgaatattaaagaatccctattggagaaactggatttcgtagtctacgcagcagacaagaaagagatagttgtcacacaaggaacgccttgtaacaaactgtatgtgttgttggaagggaaattacgcacggatattatcgacggactgggaaacgaagtgatgattgaatatatcattgcgccacgcacctttgccactcctcatctttttaatccgaataatacattgcctgccacgttcaccgcccttgaggacagtgtgatacttatggcaaccaaggattccacctttaaagttatcagccaagacccgcaagtgttgcacaattttctctgcattgccggtaattgcaacatttgtaccgtatcacggctgaaaccactctcccgaaagactgtccgggaaagatttatcgtttatctgtttgagcacaaaaagaaggattctctgatagtagagattacacatacgcaatcccaacttgccgaatacctcaatgtatcgcgccctgctctatcgaaagaaataaataagataatcaaggaaggactcatgactatggaagggaaacgggtggaaattctgaacaaagtagctttagagaaattcatataataaaaatgtggcgcagcttaaactttcggtattatgctgcgccacgcttatcagaatattatccttatttaattaccattttgtgaaaaacactctcggattgatattcaacgatacccatccccaatcttgccagctcttatgattaccgcctttcactgcatccatcgtctttgtgccacgcatgaaagaatatccggcagagagtttcacgtctttcatcaccgaccagttaatctgataatcgacttccgaacccaaggacttcttcaagtccggcaatttaaccgcagtagtgaaatagtgataattcaactccatatccactttgtccgacgcacggaaacgaccaccgatacggctgtccattaaacccggtgcataaccgttcacaaatagattcgcatagaaataatccatacttccgtagaacttatggtgtgttccgtagagagggtcgaacgctttaaacttgtcgccgtttcccttatcgccactcagataatcgaaacttgctacaactccccatgtcttgtcaaaagcataggcaacctgcacgcttcccattaatgccgacactttctcagcatccttattcttgcccgtctgatagtagaaagcaccgtccagattccagctaccgggcttataggtaagatacgttcccattgtttgcagataacgggtatgcgaatcctgcgtagccgcatccccggtttccaatcccaggttcataaacagcaaagaagcgccgaacggaattgcatccgccttatagtgataccatacagtctgcatattcttataaggctgtgcaccggaagcataataagtaccgcctatcttcttctcgtcattctggttgaaggcaagaataaggtgtacctcattattcttattcgcatatcccagtttcaatgcgtcatgataacgtcccgccacattccagtccaatccgcccaaaatacgctcatcgtcataaaccaatgcctgacgccccaactgggcaaaaaggccgtgtccgaaatcaagttttgcccatgcttcgttcaggacaaaacgcccgttcttgtcgatctgcggatcttgtccccaaactccgacgtgctgtgccgacatcttgatttccaagtccgaccgcttgtagtcaattgacaaacgggcacgattgttgatagacgatgcggctttcaccccttcattgcgaggaaaccaagctccgttccgatactccgcccgaggtctgatttgcatcgacatcgagaactcattttccttctccgtgttttgtgtgtatgccatgcttggcaatagcatcataagcactaatgaccaataaaatgttttcatcaatattgcaatttaaatgatttgatatttcaattcaaattataagtgtgtacactgacaccttgtgccgacggaagataattgattccataccagcacatctgtaataaaacaaacgatactaacaaaataactaatgccggacgcactttcaacggtttacccagtcggaaatgtatatatgtaagataagagaaccaagttgccgctgcccatgtttctttcggatcccaagcccagtaatgtccccaagcttcctttgcccaaatagctcccgtaagcatacccaatgtcataaaagccagacctacataagtaaggttatcgcataaatccatttctttccgttcaatctcttctttcttgaaccaaagcagataaatagccattaccaccgcagcccccaacatagcataagcaaacatatacacaataacatgaggagcaaaccatggactctgtaaagcaggcattaacgtcttgttgtgaatctccggcttaaagatattgatacagataaagactaatgacagaacgcaactgaaactaagaatccatttatacttccaacgtatatacgttatcaatccagccaacggcagaaagaaagaataccacaaacgtgtctctcccattgtccgcatcggaggacgttccaaagaaacccacatgccgaggataaaacagaaaaatacagccaatcccaacagagtaaatccgtatgcccataccgttttctttcctttccaagcagcaaaagcccccaagctccaacaaaccaatgcgactaccgcaaacaatataaaatattcccaactcattccttttcctcctcttttctcttttgtgcattcacaaacagacaaacggccccgagcatcatcataactatccctgtataaactaccggcaaccacggatcacgaaccagttcgaagatactaatatcactccaaccccctttcgactcatcataactaagctgatagattttccagccttctatctccataggacggttcacttcaatcgtatcttccgtaattgttccctcctgcgtatagactttcactttcgaagcaaagcgttgcggttctctttccggcattacgaggctagtcagagaatcaaggcgcaatgccttataagggaaaagaaaactcccacaactcacccagccttccttcgtctgccggttctttcggttcacagctttcaaatgtacagcgtaagttgctcccatagaatgaaaatccgtaaacttcagcgtatcctcggtagctacggaggccgccattggaatggattgttgaatagtcagttcccaatcctgcaaagtcccaccgtatacttcttcttcaagcaataaatgtacaggagatttttcgggaagtgcacgtccggtttcattatcaatcagcatcagtttcggcggatattcatcaatagtaaaatcttttaattcgatagccaacggaagttctgtcagttgtcctttatcatcggtagcccgccattccgcgtttcccattcgggtagtcattttcagtcgctgcatatcggcattccctaaagtagctgcaatcaatgcaatgaataatccgatatgattgagaagaaacgaaaggcggccgaacttcaaagggaaactggtacggagtatcgttaatcccaatgcagtggccatccataaataaagcagaacgaaagaccaggatgaaatcatctgtgaaaatcccagtatgtcattcgaagcatgaccggaaggagcctgccggataagacccattaccaccgtcataccgaccacccagacaagggaaaaaacggctgcggaataatggctcaaccacccaaacaaatagactcgtttacggagaaggtgcatggctatcagaacaatgatatatactgataacactattaaattaaccggccaggcaaacagattccaattgatacctcctaccgttatttgcagcagtgcacctatcaccaataatcctgcaccaataatcagaccttctttatagctccacggtttgctccacatatactactatcttatttttgtgccagacgaccatttgatttcgctttctccaaccaagccggaacagtcgttttcagaaatctctccttggccgctttttccgcgtcgatatccagaccgatatattgctgtgcctttcctttagtggaaatatcaggcatcggcacatctccggtaaatccattcttcgcaagcaccttagatacagctaaacgggcctgcatagcacgatcgagcccatgagaaaggattctctgaatttcctgcggcgcatgaaaagcacctccgtgggaagccactccgaaatcccaacgccactgcgcctgacgaatcagagcaagcacatttttcatttgctcttctgtcgccccattatcccaggcatatttagcttcgatatgcgcttttgccaactcctgctccaaacggttacggatttcattcgctttgcgttgacgttcataaacgttattacgcaatgtttcttcgctttcacggtgacagacctgacaagtacggtcaatcattgccaacggactctggatatggtggtcgctgaacttcacaccgccttcactcttataaggcatgtggcaatcggcacaagagacacctctctgaccgtgaatacccatttgagcaatttcgtaatccggatgctgtgctttcaagatcggggtacggctcaatttatgaatataatcataaaaaccggcttcatcataataggcttccatatcttccacagtaaagcctttatcccaagggaaagtcaggtatttgccgtcacccttgaagtaatattctacgtgacattgcgcacatacgagcgaacgcatttcctgtggagtagcctttgtgatatccttgccttgacgttggaacgcttcaatcaaagccggacggctgatatgaagattcatcgtttccggatcgtggcaatcggaacaaccgatcgggttcacaatttccgcacccatggcaccccacttattgttatagaaagaatcaacgcccaatgcttccatcatacggggaacatccgggctcttgcaggtccagcaagtagacggttgaggaccgtcggtaggattcacaggtgctccggtacgaagcgaagccgtgatatcttcgatagcatgcatatgtccgcgcggagtggaataatctttcgagaaagcatatcccgcccaaagtattaccatattaggacgttgttccagtacatcaacagcaacatttccattaaactcactttggaaatctgtttttgcagtttccgcccaagtctgatattcacgagggaaatcattcttaaagagttcgttgcgtgcttcaatccctttgatgacagtcttgcgattattaaagatactagttacttccgcccgcctctccattaatgcagaaacgcatagtcccaaaacaaaaacaacaaccattgagcctccgaacaacagccatccttgccatgattttaatttcttttccattctatatcggttttattgttttattacgtagttatattttgcttattctttattatctatcattttttggagccattccggcacgggcgattcgggaagcggtacaatagctcccggagccgtggacagcgagttcttcccgccatgagggacatcgcggtgacaatcccaacaagcctttccttctcctacttgcgacagcatataatctatctttcccgtcttcacaaactccgtattcagttgtgtatggcaacggatacagttattcataatcacttgcgaactggcttcgtgtgcctgtatcacctgcggctcacttttcgtgagaaacgccgctacgtgcttcattccgtcaatccccttgaatgtccacttctttaccgcgttttcgtgaggaacatgacagtcattacaagtagcatcccgggcatgcgaactatgaaaccaggttgcataataaggagacatgatatggcaattcacacatgctgccggatcatctcccaaatatgtatgtgcccgaagcatatacataaataaaactcctccgcccacgataacgccggtaacaatgacagctattatcttcgatttgtacgaaggaaaaattcgatttataattggcaactttatcatagggaaaagtatttttcacaaaagtaaagctttgaaaacaataaaggtgtaatatctattacacctttaaatttctttctccaattttgtacctacaaaggtcgcattttttacaatgcacctacttataatacctttattctattcatgatgatgatattcttcttctacatcgttactcaattcgatattacgggcaacatacgtctcgtttcctgcagcgtccgtgcaataaaccattaaatgataatctcccggagttgcatccttcggaatcataatatcatgatgatgaatatgtgccgttttctttccggaaatatcataagacttgttgaagctgaaatcgatggtttctccggcccccctgctttttccatgcgaatggtgatcgaagttgctgtgtatttcaatcatatacgacttcaacatcacgtcgtccgacagatccatttcaaaatgcacgccgtattcacttcctattttcagcgcttgcccttcttcgggttcgtgcagttcaatcaccggcttagtggtatcactatccgaatcgtcacaagagataaatacaaaaacagacattgccaaaaggctgattatcgggagatataatttagttctcattacagtaattttttaaatggaattttgattaataattggaagttgcgtcccggttcggggatttctactttcctgtaaaaactaagatgattgtaatatcgggtattgaaaatattccgggcggtcagggttatttctattgcctgattcccccgaatgggaatattcaacgaaccgcctaaatggaacaggtttgcacccggtgtacggtcttcgttacgatctacgcgattttgccgggctatggactgccactctgcataaagcataacctgtttcctctgccatgtcaacgtgttccgcatactaaacggaggagaaaaacttaacgggatatgctcgtcgcagttgtaggtataaacatactcaccggaaatacggtaattgaaactacgcagaaagtgaatgtctatcgttgcttccgttccggcaaacagcgcctcggctcctgtgtaacgataaatctgtccggcatgcggcaggacagaccactcgcccgtaggacgcagaaagatgtagttactaaaccaactgacgaagggagaaatggaaatggaaaacccgttataccgtaagttataagaagcgtccatttgccatccctgttctgatttcagatttgtatctccctgttcatgccggaaggtcccgtgatgcacaccgttagccgccagttcgttcgcaccgggcagacggaagctacgaccgacgtttgcttttaccatgtgccgttcggacggtgtccataccaatcccagagagaatgaataatcaccgaatttctttttcactgcatggctgttccacttatagtgttctacctgttcttcatcatatccctgttttcggagataatcggcaagataggcgtcttcatgcgaagatatatgaatatatccatagtcataccgcattcctccgctgacggagataacattattaggcttataagtcgtaagccaaagcaatccggtggtggaacggtagtattcaggcaataagaatgaataaccggaaatatcgttccgttgatgctgtccgtcccaacccaatgcatgttcccacgaagaagaaccgataaagcggacttttaccgatgcactgagagtattcaagttgaaagccagttccttgtccgggtctttctccggtacgggttgcgaaccgtaatgggtatggaaaacactccattcttcacggtgattattctggaatccaaagtcgcccgacaaaactagcttctcccacgcatactgctgaagggtagtcaccttcagatgattcaccttgctgtaaggtaattccatgttacggctgtccccgtcatcttctacgcgggatacatccggtataccatgcgcccccggaaagaaaccagttttttggtagacgttacttacggaataattcgctttatatctttgccgttgatattgggcgaagaatccgatattgcgttcaatgcctgccgtattctttagcttacgcccgtaaacaggcattttttgcgtcaggtaaacaatagtatccgtagggatgcggtaatccccgaaatgctgttcggaataacggacttgtgcataccagaaactcttctttattcccagcataaatgatcctccgagcgttccgttgacggactttcccagaagtgtaacgtctccgaataacatatctaccgagggtacgggagatgaagttatgtcaatcacccctcccattgcatcactgccatatagtagtgaagaaggacctttcaggacattgacagttccgatattgaaagcatccagttccagtccgtggtcggctccccattgttgtccttcctgcttgattccgttttcgagtacagcaatccggttgaatcccattcctcggatcatcggtttggagaagccggaacctatatccattgcttgcacgccgggaatgttctccattgcttgcatgaagtttcccgtaaaatgtttgcgcagaaaatcctgatccactacatcaaccgcaagcgcagactttttggcttgacgttgctggtacgactcggtcacaacgacatcaggcaaaagtaaactcttgattgaatcggacttctgtgcgtgggcgggtaaggctacagtcagccccaatacgcccgaaataattccgatacgcatcaattacaatcttttatataatgtgtaaaatgaatgtgaggacaggttacgataagcctgccttcttgaaaagtttgattatgtaattatgcaacagggggtgcacgcaattgatgtgaataagtccgtttgcaaacgaccttatcctgataaacaaccggctcgtaaggcacgagcgttaatgtacaatgaaattctaccggttgaggttcagtaaagaaagaaagggagtattggcatatcgcacaatcatcggatgatttgtgagaatgcccggcatgagaacatgacttttcatcctcgcttccatgatagtgaaaggtcttcactacaaagaacggaatgaatgtcatgaacaacacccatgctatgtacgctcttgtttttctcttatgatacattctccctctattgattatatagaatagcgggaacaaatataggggtatgaaagagaactgacaaattatcaggcttaatatgtgttatcagacaatattccttttctgaaattacctctgaaaaactatttttaaatcatctcattcttcctgtttccatacataaaacacattccttcccgctctagtcacggcagcagtattcaatgcccattcacggatatatacttcgtccgcttccggtgtatcaaccaacttcaatctctgcggctgcgcattgacagccaacagttcgccaacggtggttttcgcatccagtttattctggtacttttcgatagcttatgtatccaaagaaagaaggattgtatgccactccgatcttctctgatatcttcatcggataagcagagttcatccaagcgactaccagattaggagaatttcaacttcagttcctcacgcttcgcctgagcaaccgaacggcttttatccaaaacagcagttatatacgcattgtttctacccgccttacggatgataatcttaggttcgatgatttgcaggaatccggttttcttatacccccaaataggcattttttattttatggcaaaacgggcggtcatttcatatctcagcttgatgacacggtactgttcggtagccaccgtccccatgctgacattgctctgtgcctggaaaggaaggtaacggcttatattgttatcggcaggttcgatgatacgaatgacttcacccaattgctgtcccattgctgccaccagataggatgctttctcacgggctgctttcaatgcttcaatctttccctgcttcctatacatcggcaagtccttatgtttcagttccccgatacgcattgattcaattccccatgtattgacagaccggataatggaattgatttgctcgaaatccgtaagacgaatatccagttgtttgccaatcaggaattccttccctctctgacgccaatagtcccctacttcctgcgtacggatagcctcatccgatattcctattttacgcaaacttttacgcaaatctttctctatcacagtcaacggcactttcgtccgaaaatcttcctctttctttgatttacccgtatattcttcttcccagtattcctttatctgaatcagaaagtgtatttcgtccgggacgacttctatctccgaagaaccggtcacttcaatatatctttcatcactttcctgagcattggcaaggatattccatgcgaacaaggcaaaagccaataaaaatacttttctcatatcttcgattattagggtgttattactttttatatgccatcagttcacaaagctataaaaaaaatccatattacgaacttcattctaaaatatcaaacaagcactttctatgtatcaaaataacatctcctttctttactttatacttataaggctgtttgcccaaaagaagagaaactatgcagtaaataacaaaatgaaaaacggctcgagtggaattactcaaacgaaagaaattagcctgtggttcgtgaggctaatattaagccagaaaaaaattaagagttgcgtccaaaatagttgctttttgattccagaattaatataatcgttttttttgatgattatatgacgttttgatgaaatttaaagaacaagctatccgacaaagcacaaaaatagtatctttgcctgcgatttattcaccaagatgtgataaagctatttttaatcatttaataataaagactatgattagattgaatgttttcgtccgcgtaagcgagacaaaccgcgaaaaagcgattgaagcagctaaggaactgactacttgctctttaaaggaagaaggatgcattgcttatgatactttcgaaagcagtacccgtcacgacgttttcatgatttgtgaaacatggcagaacgctgaggtattggcagctcacgagaagtctccgcatttcggcaaatatgtaggtatcattcaggaattagctgaaatgaaactagaaaagttcgaattctaaatgaaacacggagaatagatatactatctatccaactatcatcagaaagagagagacattcttcttcggaaggaaagaatgtttctctctttttatatttccatatcccacgggaataagaatgtatgaaggactagtccagtttcttatgaataaatgtcccttcaatccaataagtcgcgtgattcgattcaaatttcagcagtacatagcccgggtcggtagggccaccggggaaatgctcgataaaccagtcctgccaaagttcctttttcattttctcgtccgttaccacttctacagttcccgttaaggctacgctgtctcccttatcctgaaagcataatccggctttcgggttcttacgaaagtcgatagtctttaatgagtccgctccggtagacatccaaatagtagaaattccctctgttgcaatcttgctcatcggcacaggacggggatatccctctttgtttacagaagcaagcactacaacttcacatctctgcaacaactcggttgctttctctttcattgtttttgttgacataatcttattggatttatattatacctgcaaagataatggcataaacctctgttctattgtaaaaaatcgacttttacaaacctacttttgcggttcgatataggtcaacgtcgtatcatccggtattgtaatcgaaagaaatgaggcaggagtgctgcccgataatgtcttaatctcttttgagaaatgcgccaagtcataatatcccgcattcactgccgtagtcaataaattgggagatgttgtattccttaacaattctacggcattcttgaatttgataatacggctgtattctttcggagtgaatccggtataatacttgaacttccgttcaaaatggcgctgacacaaacagacctcatcgatcaaactacgaacaggacgttttcctccgaactgattgattatatccaccgccacaacaatatgagaatcggcagactcataatgacgagacagatacgacaacaaatattcttctactatccgtatccggtcgcctatatgttcttgctcgcatagcctttcaacaaaagtatcatcaaaaactgctttcatttcccttgtactgattctatcatttacaaattcatgtaaaggaaactttgtaaaacaggacaatccgcaaggcaaaaaacgaacaccaaacatatgaaccgattcggaatatgtaatcagttcggaatatttcgtcatcggccccacaaagtacgaacgataaggttgcataatcaagctttcttcctccactgtatctgcgacttctccaagcgtaaaaacaaaatcggtacaaccatccggcagaatatggatgcgcataccatattccgggttacctttaaattcccaatagttgtcaatatagggagcaagcaaatgagaaggctgatattctgtatacattgatatattttacaggcaaatatagagagaataaattctaattcaatacatttgtattcaaaaaacaacggactaatgaaagattttgcagcaatcgactttgaaactgccaatggcaagcgtaccagtgtatgcagtgtcggtattgtcatcgtaaaaggcggtaggattgtgaataaaatctatcgtctgattcgtcctgcacccaactattatactcaatggacaacagctatccacggacttacctacgatgacactatggaagcggatgattttccagaagtatgggcagaaatcaagccattgctggaaggacttccgcttgtagctcacaatagcccttttgatgaaggttgcctccgtgctgttcacgaattatatggtatgacttatcctaattacaagttttattgtacctgccgtacttcaaggaaagtgttcggaaaggatctgcccaatcatcagttgcatacagtagcagaacgatgcggatataacttggagaatcaccaccacgcacttgctgacgcagaagcctgcgcccaaattgcattactaattattcctgaaccgaaaaaagcaaagccagcgaaaaaagcaaataaagatacgcacgtcggagacttattcgattcactcattcctcaaacggtaacagtgaaaaagaccaaataaaaaacactacaactattatctcaatcaataatagccgtagtgcttctataataaaatgctaattatgtactcaaattaaaggatagacttagcgatgcccatttccaaaccgcgaagttctgccaatccgcgaaggcgtcctaaacaagaataccccggatttgtcttcttcttcaaatcatcaatcatctgatgcccgtggtcgggacgcatagcgatagagcatttgcgacgttgttgcagaagaataagagctttcattacattgtacatatctacgtttccttccaaatggtttgcttcgtagaaattgccttcttcatcacgctgtgtactacgcaaatgtacaaaatttacacggtcaccgaaacgttccatcataccggcaaggtcattatcagcacgtacaccgaaagagcctgtacacaggcaaagaccgttggattcgttaggtacggcttcaatcagttttttgaagtcttcttccgtactcaggatacgcggcagacctaagattgtataaggagggtcatccgggtgaatcaccaacttcactcctacttcatcggcaacgggagcaatttctttcaggaagaaaatcaggttggaacgaagtttttcagcgtcaatgtcattgtaacggtcgagcgcttcctgaaattgttctactgtgaaactttcttcagagcccggaagtccggcaatcatgttgcgaaccaagagattcttatcgtcttcgctcatctgttcaaagcgagctttcgctttggctatttcttcaggagtatagtctttttctgcgttcggacgtttcaagatgaaaaggtcgaaagctacgaaagccgctttttcaaaacgaagcgctttagagccgtcgggcagtgtataggcaagatcagtacgtgtccagtccaatacaggcataaagttgtaagtaactaccattacaccacattttgccaggttacggatactttccttatagttctcgatatatttcatgaagtcgcctgtctgtgtcttgatatgttcgtgcacaggtacactttctacaacagaccatgtcagacctacttcttcaatcatttgcttacgcttcatgatttcttctactgtccatacttcaccatttggaatatgatgaagcgcgtttactataccggtagcgccggcttgtttaatatcccacaagcttaccgggtcgttaggaccataccagcgccaagtttgttcacataaatacatatatagctgttatttatagattactgattatgattgaaataaattagatagagaatgcgtcgaaaccaccatcgataacagctactgtacctgttacgaagttagaagcatcactaatcagataatggattgttccataaagatcttccggttcgccgaaacggttgaacggagtatgagcaaggattgtctttgaacggtcagtcaaagaaccatcaggattagttaataatgtacggttttgttctgtcaggaaaaagcccggagcgatagcgtttacgcgcaagccgttaccgaatttcagagccagttcagcagccatatatttagtaaagttggcgatagcagcttttgccgcaccgtatcctactacacgagtcaacggacgaagagctgattcagagcagaagtttacgatagagcctttcttctgttctaccatgatctcagcaaataccattgtaggtaatactgtaccgaacaggttcaggtctactacctttttgaaagcgtcaatctgcaagtcgaagaaagtcttgtccggcgcgattgttgcacctgccatgttaccaccggcagcgttcagtagtacatcaatgcggccataagctttcataatttccactttgttgccttccaatacttctttgtccattacatcagtataaaggaacatagcttcgttaccctcagctttgatgctgtctaccaatgcttttcctgcttcttcgcttctatcgagcacaacaacttttgcaccttcttttgcgaggtatgcagcaattcctttacctaagattccggctccaccggtaattacaacaactttgtcctttacgttaaataattcattcatggtttctaaaaaatttatatgtttatagcttattgttcagataatatttcagattctctttcaggagaatatctatcggcatcagatttaccatttcagaatgttgcttgaacaacagatgattgcataaggatttaattccttcatatccctgccgttcgggacgctgtgcaaccaatgcggtaatcactccttccgaaagtaactgcgtatttctctcgataaggtcataccctaccagttttaccgattgcatggctcttgctttcaggtaatttcccaaaatatagcaggtagaattgaaaataacagctccttcgatattcggatttgattcaaagatttcatcaagttttgtgaaattgtataccgagtcattgattttcaactccacttcatgcagacttccggtgaatctcatttcttttaggtaacggcaaaatccctctctacggtttcttccctgattagagtcattctttccgctatggataatccgtgccatgagaatatcggaagcgggagagattctatctgtcagcaacctggcggcaataactccggcatcataagattctgtaccgaaataggctagttgatgttgtccctcaatattggaatcaacataaatatagggaatttcgaatcggtcgagttcccgcgaaagccggataactgaatcggtaaacaatgtggcaattaacacaccgtccaccttcttgtccaacagattgcggactatatcatcaaaagttttgttgtcatactggtcaaaaaagagtttcgtgatagttatattataagcccccatttcggatgcagccttatcaatgccttccgaaatggcttcccaatactctccctgagcaaaagacggggtgattgcaataaagtgatactgtttcttagacgccaatgaacgtgccatgagattaggctggtaattaaccatctccagaatagcctgcacttttttcctgttttcttcagatacccgtccacgattatgaatgactctatccaccgtaccgacagagacacccgccattttagcgatgtctacaatacgaatatttgagaattctttgtccattcttaataagtatcttgtttttcgtcgacaaaagtaaaatgaattattgaattaagcaatagtgtgtgcgcacacacatgaagccataaaacgaactataaaactaattatcaaacacttacctcaacgacaacaaacatatacatgttattaaacataagaaaaaagataaaaacattaagaaaaagcactccagagaatggatacagaaaagaaaagaaagacttttgatcactgaaaaaagacagaaagaatagagaaatggtaaagtgtgcacgaacacatgaaaatattcagtgtatataaaagcaaatagaatggtaaaaaagaaattggtaatcaattagatgttaactgattaccaattctgggaatgttatttttcccatttttcttttgcttttccagcgactttatcagcttctgctgccactttatcagctatttcagctccggtttctaccgctttcaatccaagattcattgcttttttctctgcacaagctgctgccacctcagcatcacgaccaatgcggtggatagcgtcataaatttcactttccagttgtttagcttttgctgtacgtgaaagacgataaacaacagcaccaaggatagaacctattccgagtccaatccagaaatttccatgtctacattccataattaagttcagtttttttagattaaaaataaattatataaaatacctatttggattttgagaataaagaagcaatccataatacaagaatagcccccactgtagaagttatcaaacttcctatcaatcccgaggctgcaagtccgaaaagggcaaatacccaaccgcctaatacacctcctagaataccaagtaataaatttattacaagaccaaaacctccgccgcgcataattttgcctgcaaggaatccggccacaataccaataataatataccaaataaagctcatatcatcctccttttttatttaacaacagcaggtgtggcgaatggttcagtcagtcaaaaatgaattaacgacaatttacaatccttagttctagggttttattatcagagactattctcttgaagtaaaaaaagagtctgccaaagaaatgacttcacaatccggacaaactatctttataccctgctcggcagtcttctccgcttcaatcgaggacagacaacctttaaaagaatctatcgccagcactactttcttcatatcatatagaattaatcgtagcaaatatattgagaaacgggaagtttgcgtacctttgcagccaatttttcaggaacatctctaaagaacaggtattatggtacagaatcaggaacaacccgtaggaaaaattacattctccattttaatcgcattgagtctctcacattgcctcaatgaccttttacaatcggttttatcggcctcttatcctctattcaaagatgacttaggacttagtttcgctcaaatcggactgataacattggtttatcaactttcagcttcggtttttcagccgattacgggaattatctttgataaatatcccgtcgcgtggtcattgcctatcggaatgagcttcactatgatagggctgataaacttagctttttctgataatctttattggatattattgtctgtattcttaatcggaatcggttcttccgtattgcacccggaagcctcgcgcatcacattccttgcttcgggcgggaaacgcggattggcacagtcactctttcaggtgggtggtaattttggcggttcattaggccctttactagtagctttactggtagctccctatggaagacaacaccttcttatattcgcatttgtcgcattggcagcaattgccgtcatgtatccgatatgtaaatggtataagtcttatctcaatcggatgaaggctcagacggtcagcatcagaaagccggtccacctccctttaccaatggataaaacggctatttctatcggtatattattgatattgattttctcaaaatatatctatatggcaagtctgaccagttattatacattttatctgattcacaaattcaatgttacggtacaggaatcacagctatatttattcatattcttagttgctaccgctatcgggacattgattggcggtcctgtgggcgaccgtgtcggtagaaaatatgttatttgggcctcaattttgggagctgccccgttcagtttattaatgcctcacgctaatctggtatggactattattcttagtttctgcgtaggattgatgctttcttccgcttttcccgccatattactttatgcacaagagttgcttccgaccaagctcggattaatatcaggactgttctttggatttgctttcggagttgccggcgttgcatcggctgtgcttggcaacttagcggataagacgagcattgagtatgtttacaatatctgtgcttatatgccgttgctgggattagtcacgttctttctgcctaatttgaagaaacagaaaatataaaataatatcctcaatatagaaaatagtcggcacgcatcctcacgatgcatgccgactcacaagttaaggtcaaagtcaaaaaattaagagagctatttatatgttaggattagcattaatttctttttgcgggatagcatacaaataataagtgctatttactataaacggctttccgttcgggaagttaagaaaccaatgtcccaatggattacgtttggcaaagctaccatcttcctgccaacagtctacttccattttttgttcatcttccgacaaggctgtacgctccacagctttttgtgtacgaagtacatctgtaataccaaatccttctccccaaagttcgcgacgacgttccatcagaatctcattgattacatcttcctgtgattttcccgttacctcataatcccctactccacgggcattacgcaacgtgttcaagggtgcaacagcctgcgccaacgccacgccatcgcgtacttttgcttcagcttctatcaaatacatttcagcagcacgcatcaagaccaagtcagccgtatcatctgcacgcatatggaatttcttatatcccaaatatccttcacgcatccactgaaacaaaggcaaacgaatatcaccttcggtaaaggtatcttttaaatgaggatcagccataaaactgctataagctccgacgtatgtggcatccaaataatagaagttatagctggcgtccgattgggaaggtatttgagggaatccccatatccattccttattggatatattattaaaaccttcgtactcggcagtagttgtcatcaatgtatagcctgcacgagcggcttcagcaacttttgcagcttctttccactgtccggtcagcaagtaggcacgagccagaaggccgttgacgactgctacattcggcttgaacttctggttatcaccactgcgaacatagtttttcaaataatcctgcgccaagttcaaatcgtcaaaaatacgctggtaaacctgtgccactgtcgattttcctttcggtaccgtctcattattactcggttcggtataaataggaacacaaggtgcatccttatccttcaaataggtaaattgataatgctgtaccagatgcaaatagcagaaagcacgcaatgccaatgcttgtccctgtacctgtcggagttcttccgaatctcccttgatagaaatggcagtattacaattatctatcgttttatatatcagataccaggcaaactctgttctactgttcgaagaaagtgctatatcattaaactgatacgaagaattaaaaccatatttcggacgggaaacaacatcacttgccatcatatcatccagacactgaagtgcccgataaccaatattggcataggtacttgaataatcgaacagattataccaggcaccatttacaagtgcttccgcattttcgggtacagataccttatccgaacttaccgcatctgtgggatctgtatcccaaaagctactgctacagctcgttgccaaaaaaagaccggcaacagctacaagaatggattgtattttcatttttctcataatttagtctgaatctagaaagaaacattgatacctccggaaatggttcgcatagccggataacggtaataagtaataccggtaattccctgttcagggtccagtccttgattccgatgaatggtaaacagattatctccttgcacatacacctgcacactgctcaatgacaacttactgatccactgtttgggcaagttataggaaagtgtcaggttttttaatcgcatatacgaattattctgcaagaaacgggtagaagccgagttccagttattagaagtagtactcaaggcaggaacatctgtataacgattgtcgggcgtccatctttttagaatctccgtcgaccagtcgcgtccttccaagctaccattgtg

SEQ ID NO: 3078 - DNA, 17550 bp, Unknown
  gut microbiota DNA sequence
tatccaccgatactataggcaaagatggccgaaagatcgaatcctttccaggaaagagacgtattgaatccgccatacaccttcggaagagacgacttattgacataataatagtcagccgaactataatcgtttgttgtgacacgtcttccggtcggatttttatttgcatctttctcatccatataccacagcggatctccattttccggatctactcctgcccactctatcatgtagaaatcgtagaccgaacggcctacctgcaacttgttcacgccacttctcggcatatccttcaaaggaaggtccgtcaccttattcttataatgcgtcaggttcattcccagtttccatacccaaccgttctgattaataatcgttccgttaagaaccatttcaatacccgtattttttaacgctcccacgttttcgtcaatagagccatatcccaaagaaggagctatcggacgcgaataaagcaaatctttcgaacgacgggtaaagaagtcgaacgaaccggagaaacggttgttaaacagagaaaaatcaatgccgacattaaagttcaggttcgtttcccatttcagatttggggttgccatgcggtcggacaccaacgcattttctcccaagttggaaacaattgaataaagccctttgcttgcatagtatgtacccaggttgtcatttccttgcgcaccataactcatcttcaacgtcagggcagaaagccagtctgaagtggaagccataaaactttcccgatcgacacgccatgaagcacccaatgaccagaagtttccccaacgagtctccggtgcaaaacgggaagaaccatcacgtcgataagaagcagagaagaaatatttattccggtagtcatagagtaactgggtaagataacctaccaaagcataatcaatacgataacccgaacctcctgtcaattgcgaacccactaccagttccggcatatcaggttgcgccattttagaacgtgaagccgtcagttcatcataccgataagagtaagactccataccggcaagaacattaaaatgatgttcaccgatagtcttgtcatacgtgacaatattattccatgtccaggaaaaggtacgggtattcaaccgactgacaccacctccgttttccttggcaggacccaatttcgggttcgtataatccaacgtattgtagtttatcaaatcgaaattgaaacttgtcttgaatttcaatccttcaataatcgtagcttccagaaaagtacgaccggaaacttcatctttcatccgctccgatttgtctaaaggtaaagtggcgggcaagttccagttcgccatagagcctgaaggacggtaagagccgaaatcgtaaatccggtttccgctatcatccagtttatagcttccgtcggcattcatctcataaatcggataaaaaccgggcattgtacgtcctgctgtaattacattactggttttagagtctgacgataccggataattctgcatggagtgggcgaaactcaaattgacgccacccttcaaccaagaagttatttcactggttatattcgaacgaagattaaaacgctggtaaccggattcgagtgctatacctttgtcattcaggtatccggcggaaaagaaatactgattagctttaccgccaccggaaacactcaaattcaattccgtacggagcgcctgctgttccatagcgtcgctccagtcagaatcccataacggacgggcacccgctaccaattttccgtctgtaccgacaggctgtgcatactgcggaccataaggattgggacctccgcccattaatttcgttaccaaatccttggaagcctgggcagcggcagttgcggaagtataatccgagcttttggcatactgattgcgcagcgcttcccaatacaattcaaagtactgattcgtgctgacacggtcgtaatcacggacagcacgattggaacctcctaaagacgctttcacttttaccgtcgccttcgagtcctgttgtccctgcttggtagtaatgataatcacaccattcgcaccacgcgaaccatacaaggcagccgatgcggcatctttcaggacagtcattgaagatatatcatcgggattgatagaattgacactaccatcgaacggaacaccgtccaccacatacagcggagcactggaagcattaatagagccgataccacgaatacggatttccgcatccgttcccggctgaccgcttgccgcacttgcctgtacaccggatacagtgccttccaatacacgtgatacgctggaagtctgcaacttctcaatctcgcctgccttcattgtcgaagcagccccggtaaagctatatttcttggcggtagcataggctactaccattacttcttctagttccttactttcggagtccagcgtcacgttaatcacattccggttattgaccggttgttccactgttttcattcctacaaagcggaaaactaacgtaccgttgacgggagcttcaatagagtaatttccatcaatatcggtaatcgtaccggaagaagcccctttcagttgtacggaaacaccgggcagcggttccccttcggaagttactgtccccgtcacgcgtttttcctgttgtgtatttgcatatatacttcctgcaaaaaacagaaaaaacgctgctaataaatgtaaatagattctcataattttgtggcttaatatttatttgcttgccgtaattaacagtatagagaagttttttgtttaggaaacgaaacattttttagatgattgttagcataaatcagcgaaagatagtactttcgtgaaacgaacaacatctataacagtaacgaagaaccttatgatgaaacggcttattctatctttctttctgctgctgtcactctctttgcaggctcaaactgaaaagagggacagtctcatgaatgacaatatagaagccgactcactcacatccgtccgaccgagcgcctttaaaagagccatcaaaaaattcatgaacttcagtgatttcgatacgctctatatcagtcccaaccgatataattatgcgctaatggccactcatttcagcaacttcgaatactactcggtcagcagtgacctgccccaacctcaaaagctcagtttctcccccaatccacataacaaaatcggattgtactttggctggaggtggattttcctgggctggtctgttgatgtggacgatatttacaggaaaaccaaccgaaagaataaaggtacggagttcgacctaagcctttacagttccaagctgggtgtagatattttctatcgtcgcacgggaaacaattataaaattcataaaatcagaggattctatgacgagattccttccaattattccgaaaacttcaatggcctgaaagtagatatcaaaggcttgaatttatattatatatttaataaccggaagttttcctatccggctgcttttagccagtcaaccaaccagcgtcgtaatgcaggtacattcattgcaggtttttctatttcaaaacacaaccttgattttgattatgaagaattacccgagtatattcaagaaaagatgaatccgggtatgaaagtcaataaaatcaaatacaccaatgccaatatcagtttcggttatgcctacaactgggtatttgcgcgtaattgcctggcttgtatctctctcacccccgccattgcctacaaggcttccgacgtagatgcggaaacccacgaaggaaaacaatggtacagtaaattcaacctcgactttctgattcgcgcaggcattgtctacaataacggaaagtattttgtcggttcctcctttgttggaaaaaactataattatcatcggaacaatttctctttggacaacggattcggcacacttcaagtgtatgcaggcttcaacttccatttgcgcaaagaatataggaagaagaaataaaaatacatacatcagaaatctccaacttgcttgcttatccaaagaatctttgtacatttgccccgttcttacctttaaaacaagaaccaaatgaagaaacaacgtcatatacagaccacacgtacccttctttcccgtttccgctactggggcaggaagaactatgctgcttttgcaagtatgggacgtgaattccaaatcggtcatctgcataccaatgtggtggacgttgcccttcgcaagcagaatgctgcacaaactatcccttatcatacatttatgacacttcaagaaatcaaagaccaagtgttggcaggcattgacatatcgcccgaccaagccgcttggctggccaatatggctgacagcgaggcgctctatgccgccgcgcacgagattaccgtcgcacgtgcttcacacgaattcgacatgtgttctatcattaatgccaagtccggcagatgtccggagaactgcaaatggtgtgcacaatcctctcactacaagacgcaagccgaagtctacgacctccttcccgctaaagaatgtctccgacaggctaaatacaacgaaacccaagacgtcaaccgtttctccctcgtcactagcgggcgaaaaccttcttccagacagataacccaactttgtgatactgttcgccatatacgacgacactcgtcgattcagctttgcgcttccttaggactacttgacgaaaacgaattgcatgcattacacgatgccggaattacccgctatcattgcaacctggaaactgcaccttcctatttcccgaaactgtgctccacacatacgcaagagcagaaactggctaccctcaatgctgcccgccgtgtaggtatggatatttgctgcggcggtatcattggcatgggagaaacaatggaacaacggattgaattcgcttttacgctgaaagcactgaatgtccaatccatacctatcaacctgctgagtccgatacccggaacgccgttggagaacgaaaagcctttgagtgaagaaaaagttctcagaacaattgccttgttccgtttcattaacccaactgctttcctgcgttttgccggaggacgttcacaactatcttccgaagctatgagcaaagcgttatacattggtattaattccgccattgtaggtgatttactcactacactcggttccaaagtctcggaagacaagcaaatgatcctgaaagaagggtatcagtttgccggctctcaattcgaccgggaacatctatggcacccatatacatccaccaccgatccgctacctgtatacaaagtaaaacgggcggacggagccactatcaccctcgaaaacggacgaacactcatcgaagggatgtcatcctggtggtgtgcagtgcatggatacaatcacccggcattgaatcaggctgccaaagaccaattggataaaatgtctcatgtaatgttcggaggattgacacatgaccctgccattgaactgggtaaattactattacctttagtaccaccctccatgcagaaaatcttctatgcagattccggttcggtagcggtggaagtggctctgaaaatggctgtacaatattggtatgcagccggaaaaccggataaaaataactttgtgactatccgttccggatatcacggcgacacatggaatgccatgtccgtatgtgatcctgtaacgggaatgcacagccttttcggtgcgtcacttcctgtccgttattttgttccggctcctttatcgcgtttcgacggtgaatggaatcctcaggacatcgaaccgctacgaaaaacaatagaaaaacattcggaggaactagcagcgctcattcttgagcctattgtccaaggagcaggcggtatgtggttctatcatccacaatatcttcgcgaagcggaaaagctttgtaaagagcatggacttcttttaatctttgatgagattgcaactggattcggacgtaccggcaaactttttgcctgggaatatgccggagtagagccggatatcatgtgtatcgggaaagcattgacaggtggatatatgacactttctgccgtattggctagtaatcatgtggcagatactatctccaatcatgcaccgggagccttcatgcacggtcctaccttcatgggaaatccgctcgcttgcgcggtggcttgcgcgtctgtccggttattactccaatccggctggcaggagaatgtgaaacgaatcgaaacacaattaaaagaagaactggcacctgcccgggaacttccacaagtagccgatgtaaggatattaggggcaatcggagtaattgaaatgaagcgtccggtaaatatggcatttatgcaacgccgttttgtggaagaaggaatttgggtacgcccgttcggaaagctcgtctatctgatgcccccctttatcatcactcccgaacaactaagcaaactaacgaccggattactcaaggtaatcagtggagaacgtaataaaatatacatcaataacttatgatatcagaccatataaaccaagaacttcttactctaaaggaaaagaagaattatcgctctctcccacccctcatccacgacgggcggaatgtaattctgaacgggcaacggatggtgaacctgtcttccaatgattatctcggactggctaataacatatcgctgagaaaggaattcctaaagacaataactcctgaaacattcctgcctacctcttcttcttcccgattgcttacaggcaattttaccgattatcaagaactggaacaacaactggcagccatgttcggaacagaaagcgcacttatattcaatagtggttatcatgccaatacagggattcttcctgccgtcagcaatgctcagacattaattcttgcagacaaactggtacacgccagtttgatagacggaatcaggttgtcatctgcgaaatgtatccggtatcgccataatgacttatcccagttacagcgattgatttccgagaatcacaatgcgtatgagcaaatcattattgtcaccgaaagtatcttcagcatggacggtgatgaagccgaccttcatgcccttgtccaattaaaaaaaagttattccaatattcttctttacgtggacgaagcccatgctttcggtgtacggggagacaacggattaggatgtgctgaagaacaaaattgcatcaacgatatagactttctggtaggaacattcgggaaagcaatagcctcagcaggagcttacattgcctgccgacaagttatccgggaatatctaatcaacaagatgcgcacgtttatattcacaacagcccttccacccataaatattcaatggacctcgtggatactagaacaactaccctctctccaagagaaaaggacacatttgttacggatcagcaacaaactaaagactgcacttgtcgacaaaggatataactgtccttcggtaagccatattgtccctatgattgtaggggcaagtgaaaacactatatgtaaagcagaagaaatccaacgcaaaggattctatgcattgccggtacgtccgcctacggttcctgaagggacttcacgcatccgcttctcattaacagcggacatcaccgaacacgaaatcgaccaacttataaaattgataaacggatgaaacagcattttatcataaaaaataatcaaaagcatctattgcttttcttcgcaggttggggaatggatgaaactccatttttgcaaatccgcccgaccgataaggattggctgatttgttatgattatcgttcattagagttcgatgccatcatcttgcaagagtattccgaaattaccctcattgcctggtccatgggagtatgggcagcttctcagataatgaaacaatatccatccctgcccctctcccaaagtatcgctatcaatggcaccccttatcctatacatgaaacgaaagggatcactcctgccattttcgaagggacattgcaaggtttgaacgaacaatccttgcaaaagtttcaaagacggatgtgtggttcaacagccggttacaaaacttttcagacagtagctccccaacgttccattgaagaactcaaggaagaacttgctgccatacaaaagcaatacttatcattaccaccttcggactttgcatggcaaaaagccatcataggaaagaacgaccatatcttcctgccggatagccaatggctggcatggagaaacaaagtggattctcttgagtatacagaagccgcccactatcaacaagaactttttgataacgtaatcatgcatatcaactaattattgatttatggataaacaactaatttcaaaacgtttctctaaagccattgctacctatccgcaggaagcaaacgtacagcggcagattgcagataaaatgattcacctgcttacaaaacatatatccttcccctgttctaaagtaattgagttcggatgcggtacgggcatttattcccgtatgctgctccaggctctacgaccggaagaattattcctgaacgacctttgcccggagatgaaatactgctgtgaggatatactaagaaaagagcaagtatcctttcttccgggagatgcagaaatcgttcctttccctactggaagcacattgataacttcctgttccgcgttgcaatggttcgaatctcccgaaaactttttcaaaagatgcaatgctttgctcaataaacaaggctatttcgctttcagcactttcgggaaagagaatatgaaagagatacgagagctaacaggaagcggactcccttatcgttcacgggaagaacttgtaacagccctgtcaactcactttgacatactccattcggaagaagaacttatttctctttcgtttgataatcccataaaagtactttatcatttgaagcagacaggagtaacaggagtaaccggcacatcttcccaacaactgcggacacgccgtgacttgcagttattcagtgaacgttacacacaagaatttactcagggcacttcagtatccctgacttaccaccccatttatattatcgcaaaaaagaaaaaagtatgaaacagaatgtatatttcgtaagcggcatcgacaccgatgccggtaagagttacgccaccggatttctagctcgtgaatggaacaagaacggacaacgtaccatcactcaaaaattcatccagacaggaaacgtcggtcattccgaggatattgacttgcatcgtcatattatgggaatcccctttacagaagaagacaaggaaggactcactatgccggaaatattctcctatcctgcctctccgcacctcgcttcccaactggataaccgtcccattgacttcggtaaaatcaaacgtgctacggaagaattgagtgaacgatatgattatgtcctactcgaaggcgcaggcggtttaatggttccattaactacggaacttctgacaatagactacattgcccaagagaattatcctcttatttttgttacttccgggaaattgggaagcatcaatcacacccttttaagccttgaggccatacaaaagcgtgatattgtactggatacggtactttacaatatgtatcccaccccaaaagataaaacgattcagaatgatacgatgaacttcattcaaaactggttgaagaagtattttccgaacacgaagtttatattgattccggaaataaaagacttatgacttcaaaagactagcctcactatttagcaggctagtcttttgtttctacagaccacttattcgattaccatgatgcggtcattcagcccaaccttcatattatcttctatgaacacttctttcacaacgccgtcggtcaccgcacgaatctcattttccattttcatggctaccaacacacagagcggatcgccgcgtttcacgctatcacccttctttacgtatgttttcaggatcactcccggcataggagcctgaaccacctgacgtcccacagcttccgccccgctacgggcattgtgtatcttttccatttctccctgcaactcaatctgataaaactcccccttattcattatagtatatgaattattggaagaaggagaaatctgtactccatgtgaatgatggtcgatgatgattgaatggatagagtccccccccatattgtaatcgacctcatataccttgccattgactgcaatcttcttgattggcccatcttccagaatttccaccttatattcactatccggcatatcctgaagtttggcataatatgtagccagtgttgtacccataagctatttctttagtttttagtttaataattattggctgtcatttgcaacttaccgtaatatttccagagcgactctcccactaccggaagcgtcgttgcacgcgaggcggcctccttctcccgttcgtaatgccttactgcggcagctatgacggccaccgtcggatcagtattctgccggcgtttcaaatcttccttatcgaagcgtgtatcaataaaagtagtatcatactttccttccagaaatgccgcattcttcaatacacgctgatggaaaggaatcgtcgtcttgatacccaaaatcttatattcgcgcaacgcacgcgccatattcgaaatagccgattcgcgggtacgtccccagcaacagagttttgcaatcatcggatcataatgcagcgaaacttcaaatccggcataagccgcactatccagacgcaagttacgtccttcgggagcctcacgaaccgtaatcacgccgggagaaggcataaagttattttccggatcctccgcataaatacggcattcaatagcagctccgctaaactttatatcatcctgtttataaggcagaggattgcccgcagccacggttatcatatcacgtaccagatcgacaccggtgcattcttccgtcaccggatgttccacctgcaaacgggtattcatttcaaggaagtagaaattctgatccttatccatcataaattccagggttccggcactataataaccgattctcttacaggcttccacagcaaccttcagcattttcttccgggtatcttcctttacaaagggagacggagattcctcaatcaccttctgattccgtcgttggatagaacattcacgctctcccagatgaacgacattaccatatttatcccccataatctgtacctcaatatgatgcgggttttctatatatttttcgatatagacagcgtcattaccaaacgaagtcccggcttcagattgagacagacggagagccgcctccacttcctcttcggagcgtaccagacgcatccccttccctccacctccggcaagtgctttcagcatgataggataaccgacttccttagccacctttttcacttcctcgattccctgcacaggcgcttctgttccgggcacaataggaagtcctgcttcacgcataattttacgggcttccgtcttgattcccattttagctataatgtcggcacccggaccaataaaaatcactccttcttcttcgcaacgacgagcaaaatccgcattttccgacaagaatccgtatcccggatgaatggcggctccggtctttttggcaatggacaatataagttccggcttcagataggaagtatcttcgggtgattcggagatacaataggcttcttcggcataacggacgtgcaaagctccccgatctacatgggtatatacagctaccgttgaaatattcatcacccggcacgtacgaaagatgcgcatggctatttcaccacgattagctactaatattttctttatcataatctttttctttttaatgaatactctccattctcaactctccacttcttaaagcggaatattcgaatgcttccggggtggattggactgccgcttgttggcaagcatctcgaagctgcgaatcaggcgcaaacgggtcattgccggatcaatcacttcatctacatatcccagttctgccgcacggtatggattcgcgaacttttcccgatagtcgtcctgaagttctttccgcttctctgcgggagcctgcgacttttctatttctttcttgaaaaggatgtttactgctccgtccggtcccattactgcaatctcggcagtgggataagccaggttcacatcaccacggatatgtttggaactcatgacgtcataagctcctccgtatgccttacgggtgataaccgtaactttcggaacggtagcctcacaataagcatacagcaacttcgccccgttacgaataataccgccgtattcctgatctactcccggaaggaatcccggcacatccaccaatgtcagcaaaggtatattgaaagcgtcgcagaaacggacgaaacgggcagccttgacagatgcattaatatccaaagtccctgccagtaccaacggctggttagcaacgactcccaccgtctttccgttcagacggatataaccggtaacaatattcgccgcaaattccgcctgaagttcgaagaaactgttatcgtcagccacggcctcaatcatttccttgatatcataaggttggttcggattcgtaggaaccaagttagaaagttccggagtcaagcgagtgggcgaatcgctcgttgctacaaacggaggttcctccatattatttcccggcagataagaaatcagttcgcggatatagttgatacattcaatatcattttctgcggaaagatgagccacgccggatttggtcatgtgcacgcctactccacccagatcttccttgctcacctcctcctgtgtcacacttttcacgacatcagggccggtaataaacatatagccggaattttttaccatgagaataaagtcagtcagtgcaggtgaataaacagctcccccggcacaaggtcccataatcgcacttatctgcggaatcactcccgacgccatagagttgcgcaggaatatttcggcatatcctgccagagaacggacaccttcctgaatacgcgcacctcccgaatcattcagtccgatgataggtgcccccatttgcatcgccatatccatcaccttgcagattttcttggcatgtgtttctgaaagagctcctccgaacacggtaaaatcctgtgcaaagacataaaccaggcgcttgccgatcatgccataaccggtgacaactccgtctcctgcaaacttctgcttctccataccgaaatcggtacaacggtgagtaaccaacttgtccagttcgataaacgaacctttttccaaaagtaattcgatacgttcgcgggcggtgagtttgcccacggaatgttgtttttcaatgcgtgcgtcgccgccgcctttttctgctttcctgttcagttcttccaggttcttgataagctctttcataggctctatttaatttaaaattgtatgtgtgtaaaaataagcagtaataaatagaatcattgtcatattgattacacaaaggtattttatataatgaacgcacgacatcccgaaaatgttagcatttatgcctttaaacatctttatttattcttcaaggcatcattttttttgcagacggagacaacaaacacccgttctttactgtttatcgcgtatcatttttaataaaatctagaccctaacaaaatgagaacaattaaatttttactagcagccggtttcctgctcatgtccggtacaagcatttatgcgcaagtacaacggaacgaagcctatctacctaaattcgctatcaagaccaatgccctctattgggcaacctccacgcccaacctcggcttcgaagtgggactggcaaagaaactcaccctcgacatatcgggtaattacaacccgtggaaattcggagatgaccgccagattaaacattggcttgttcagccggaactgcgttactggctttgcgaacgtttcaacggaagtttcttcggtctgcacggacattacggagaaatgaatgtcagcaacctgaatatcttcggaatggggcacgaccgttacgacgggaatgtatacggagcgggtatctcttatggttatcaatggataataagcaaacgttggagcatggaggccaccataggcgtcggatatgcccacctgaaatatgataaatacgcccgtggcgacggaggagagaagctgggacataacaaccgtaattacttcggtccaaccaaagtcggtttaagcttcatttatatcattaaataatcgaaccttccaaaaacttacaaagatgaaaagaaaacttatctatctatttatagcctttgccgccgcaatattgccggcacatgcacagaaatttctgaatgatgaactcactctctccaatgtatcgttatggcaacaaggcaactcgctctatgtcggaatgacttttgacatgagcaaactgacaataggctccacccgaagcctcagcctgattcctttattgacagacggacagcacaacgtccccctgcaagaaattatcgtcaacggtaaaagacgcgaaaaggcctatatccgcggactagccattaccaaacaggaaccgactgctcttatcgtcccttataacaaacgggagacttttaattatacgcagatcattccatataagccttggatgagcaacgcctccttacagctcgtagagaatttatgcggctgtggcaattatcaggagatgaatgcgcaagaattaatcaccaacgacgtatctaccgaagccaaacggttaagtgccatgtctcctttcgtcgcctatatccagcctacggtagaagttgtgaaaaaccgtagcgaacaatatgaagctcatctggatttcccggtcaacaaatcagttatccttaccgactttatgaataatcataccgaactggtgaatattcattccatgttcgacaagattcagaatgataagaacttgactataaaaggaatcggaatcgaaggtttcgcctctcccgaaggaccgctggccttcaatgaacagctttccaagaaacgtgcggaagccttgaaagattatctggtcaagaatgagaaagtttcttccaaactttataaagtgactttcggcggcgaaaactgggacggactggtgaaagctttaaagtcctcgtccatgaaagacaaggaaactttcctgaatattatcaaaaatacgactgatgacgccaaacggaaacaggaaatcatgcgtgtgggcggtggagctccctatcgtagtatgctcaaggaaatctatccgggattgcgtaaggtgaattgtaagatcgactataccgtcgtcaatttcgacgtagaacagggacgcatcatcattcgtgagaatccgaagtatttgagcctgaatgaaatgtatcaggtagccaacagttatccgaaaggtagcaaagatttcgtgaatgtattcgatatcgcagtacgtatgtatcctaccgaccaggtagccaacctgaatgctgctgccgtcgccttatcacagaaagacttgaatacagccgtgaaatatatggaaaaagcagaccatacaactgccgaatttatgaacaataccggagtttacaatttcctgaacggagatatccaacgtgctatggccgcattcgaacaagctgccaaattaggtaacgaagcagctcaggcgaacctgaaacagttacagcaaatattaaatgtgaagatgaaataaatagaaaaatctatttgccgcatcgacccaagtgagacgtttgtttgttatactcataacaaatgaacgtcttactttttaaaaccagactattatgaccttgattcttgctatcattccggtactattattaatcatattaatggcattcttcaaaatgccgggcgacaaaagtagtatcatttccttagtggtaaccatgctgattgcacttttcggcttcaccttttctgtggacaatctgttttattcctttctatacggagcgttaaaagctgtctcccctattttaatcattatactaatggctattttcagctacaacgtattgctgaaaacagaaaaaatggagactataaagcaacagttcgcttccatttccaccgataagagtattcaggtattgttattgacttggggattcggcggattgctggaagcgatggcgggattcggaacggcagttgctattccggcagcgattcttatcagcctggggttcaagccgatattctcggctacggtcagcttgatagcgaatagtgtggctactgctttcggagctatcggaacgccggtgctcgtactggcaaaggagacgaatctggatgttctgaaccttagtaccaatgtcgtattgcaattatcagtcctcatgttccttattccgtttgtattgcttttccttaccgaccccaaactgaaatcactccccaagaatctgttcttggctttattggtaggcagtgtttctttaatcagccaatacctcgcagccagatatatgggagcggaatctccggctatcatcggaagcatcctgtctatcatcatcatcgtcctttatggcaaactgactgcatccaaagaagaaaaggcacggaaaagctcgttgaagacgaaagatattctgaatgcatggagtatttatctgcttattctcgtccttattattcttacaagcccactattcccgggattgcgccatacattggaaaataactggataacgaaaatcagtctgcctatcaatgcttctaccgtaaattacactatttcatggctgactcatgcgggagtattgcttttcgtgggtacttttatcggtggattgatacagggagcaaaagtaaaggacttgttcaccgtactttggaatacggtgaaacagttgaaaaaaactttcgtcacggttatctgcctggtcggattatccaccattatggacgcttcgggaatgattgccgttattgccacggcactcgccactgctaccggaagtttatatccgctgttcgcaccggtcatcggttgcctgggaacatttattaccggaagcgacacctcatccaatatccttttcggcaaactgcaagcaagtgtagcgggacaaattcatgtcagccccgattggctttccgctgcaaatacggtaggtgctacgggcggtaagattatctccccgcaaagtatcgctattgccacttccgccggaaaccagcagggtaaagagggggaaatcctgaaagcagctattccgtacgcattaacttatgtgctaattaccggaattatcgtctatattttcagttagttcccgaaaagtatttctttgtcggaataattttaattccatgaggttcttcttcaaatttggtggtaaaattaattaagaaaataataatttgatagttgatagtcgatagtattctccattctcctccttcgggaaggaggagtacccgtagggggaggtggtaggtg

SEQ ID NO: 3079 - DNA, 1207 bp, Unknown
  gut microbiota DNA sequence
gctttgccataaactactccattaacaagatttcctgttacggcatcccgacacagtttttcccattgcatattcacagactcagagaaatgagcagtcaaagcttgttcgatcggtaagcgacgaccaagttcaatgaatgaacgattagggacaacaaactgatagtagaacgccataaacggatcggcaatcttgtagagactctttttcgcattcttctcatcaatcccgaacggaacatctttttccaaaaaaccgagatcaacaagtttcttcaatggacgcgacagattagttgcaggttcattgcatcgtgcagcaatttcggaaagacggtttgcaccagtaccgatataagacattattgtcgaagtcttgacaatatccttaacatcatcctgaagcagttttatcggctcctcataaagagccccatttacagaaaggatattatgccacatggcatcatcaagcgaaattctgttttccctcagttcccaatagcgcggcacaccgccccatacagcatactcttcaatagcgttcatcgcattaaggttcaatgcctcctgaatatagggtaaacgtataggtgtaagtctcattatctcatcagcacgaccataaagaggcgcagtagaatcaagaaacaacccatacatcatattttgtgacgaaccacaaagcaccagattatacttcaactgtttctcatcaacaagtttctgcaatacagacggcagttcaggagattgctccacaagatacggaaattcgtccaaacacaaagtaaaacgtttgtctgttcgataattaaccgcacgaaacatcgactcccaatcgggatacgacaacttctcaaaatcagggaacacctgtgctatcacttttgcaagtaatgccctctgatgttgaccttccgaacggtctgcaaggaagtatacatcattttctgacaacacccttttaataagcgttgatttacccaatcgtctgcgaccatacatcacaactaacgaggatttctctcttgcaagagcatccttcagtcgtgttgcttcatctattctatcaacaaatttcatagctcacattatgcagtgcaaacataatgtttttatagcataatacaaaattttaagctgtattttttatcctgatagagtcattatcgacttatatgcagaaaaaagtgagttttatc

SEQ ID NO: 3080 - DNA, 3704 bp, Unknown
  gut microbiota DNA sequence
tttcatcagatacactaaacctacattagaataagcttctgcatattcctgatcagcagcaatagcttttttgtagtattcgattgcattatcatactctttcatattatgataaagatatgccttcacatataaatataacttattattaggatcattagttaacatcttatcagcaaattccattgctttagaagcttgattagaagtattataataatcaactagatttgcaaagaaataatcatttcctggaaacttaagaataccttcttccaaagatttaatccatgcagcagtatcacctttagctttataagcatctgccattaactgcatagcaaacttacctccatctttatcagacaatgctgaaggagcgtacttgataatagcatctttatcgcctactctatcagccgctaatgttgcataatatgcaatttgaggaagaagtgtatcatttttagctaactctttatcagccaacatcggataagaagctgattctacataagtagcgaaaaattttaatgcttccttattcttatccaaattgaaatattggataccaccattaatcaaattagggcgttcagccaacatactagaagcgtttgctttacgatatttgtttttaatcttacctttttcattaggtacctgagccaaatcgtcgcatttattataatactcatacatcttcaaaatactgttgtatacttttaatgtatcgtacggtttttttagaaaagcatttttcatttgctcttcgttgatacgcttctgaataaatccagcaacgtcccatgtgtcagcaagatccttagtttcaggattcttcatagcctcttcaatcagctgttcagcttgcttaaaattaggtttcacatcattggcaatgctttttgcttcttttacattcttcatctgagcaaatgagaagctaacagccatcaataaaaccatcgaaaataatactcttttcatgattgttgtttgattaattattaatattatgtctattcttcaatatcgttattactttcatttacgtccgtgacgtcttcagcattcggtgtatctgaattaggatcacttataattgttccttctttttcctcagcaggaatttcatcttcaagactttctgtcattactttacataccgagcctatttggtcgttacgtttctcaagattaatcagacggacaccttgagttgcacgtcccataatacggacatctgctactttcagacggattgtgataccagatttattgataatcatcaagtcattttcatcagttacagatttgattgttaccagtttaccagtcttttcggtaatattcatagtttttacacctttacctccacgattggttttacgataatcttctatttcagaacgtttaccatatccctgttcagaaacaaccattacagattctgtttccaaatctttgatacaaatcattccaactacttcatcctgtccatcattatccaatgttatgccacgtacacctgttgcagtacgtcccattacacgcacagcagcttcatggaagcgaatagcacgtccgttacgattagcaataatgatctcattgttaccgtttgtcatacgaacttcgattacgctgtcatcttcacgaatagtaatagcatttacaccattctgacgaggacgagaatattgctcaagtaacgtctttttgattacacctttcttggtacagaacaatacataatgattattgataaattctgaatcatctaagttcttcacacgcaagtatgcagttacattatcatctgaatcgatatttagcaaattctgaatagcgcgtcctttggaattctttgtaccttcaggtatctcgtatactttcagccagtaacacttacctttttgtgtaaagaacatcatagtgttatgcattgtagccggataaatgtgctcaacaaagtcttcatcacgagtttctgtcccctttgaacctactccaccacgattttgtgcacggaattcggttaatggggtacgtttgatataccccatatgagaaattgtaataatcatctgatcatcagcatagaagtcttctgggttaaattcttctgaagaataaactatctcagaacgacgttcatcaccatacttggctttaacctctaacaattcatctttcattaccttgcggcatacttcatcatcagccaaaatactttccaaataagcgatttgcttcattatttcttcgtactctgcatgaagttgatcttgcataagacctgtcaactgacgcaaacgcatttctacaattgcacgggactgaatttctgtcaggttgaatcgttctattaagccagcaatggcatcattaggagttttagcagcacgaataatacggattacttcatcaatattatcagaagcaataattaagccttcaagaatatgtgcacgttctctcgccttgcgaagatcgaattcagtacgacgaataacaacctcatgacgatgctctatgaaatatttaattaggtctcttaaatttaatgttttaggacgcccatgaaccaatgcaacattgtttacaccaaaagatgtctgtaaagcagtcattttatagagcttattcagcactacgctagcatttgcatcacgtttcacatcgataacaatacgcataccttcacggtcagactcatcgttggcattcgaaattccttctattcttttatcattaacaagatcagctatatacttaatcaattctgccttgtttacattataaggaatctcagtgattacgattttgtcatgtgtctgtcctgtttcaatttcagctttagcacgcatgatcacacgtccacgacctgtcagatatgcttcacgtaccccacttacaccatatatatacccacctgtagggaaatccggcgctttaacaaagttcatcaactcttctacagtaatctccggattatcgatatatgcgtcacatgcctcaattacttccacaaggttgtgcgggggcatattagtagccattcctactgcaataccagatgctccattcacaagaagatttgggatacgcgtcggcattactttgggttctaccaacgtattatcaaagttaggctcaaaatcaacggtttccttgtacaggtcatccatcattgcttcacccaacttattaagacgtgcttctgtataacgcatagcagcagggctatcaccatccacagaaccaaagttaccttgtccatctaccaagggataacgcattgcccattcctgagccatacgcaccattgcaaaataaacagaagaatctccatgagggtgatacttacccagtacctcacccacgattctggctgattttttataaggtttatctgaagtattacccagttccatcattccgtatagaattctacggtgaacgggcttaaatccatctctaacatccggaagggcacgtgaaacaatgaccgacatggagtagtcaatgtacgatgacttcatttcctcctcgatgttaatctttataattctgtcttgttcaagcatttaaaatgattattaattatacattctacggtttgtgaaaaaccacgctaaagtactacttttccccgatatacgaaagtttttaggaagaaagttttattcttctcatag

SEQ ID NO: 3081 - DNA, 5137 bp, Unknown
  gut microbiota DNA sequence
agcaaagatataaaatcctttttatacaatatgtcaaagaacacttgattcttactttttacacaacctcccagaaggaggagaatggagatactattgactttttagtcagtctcttttctactatttcagattcttcttcaccttttccagaagtgaaccggaaccataaccgaaccacatatcttgtatcttcccgctaggagcaataagcacataatgaggaatccctttcacctgataactcacagcaagtcccgtacggcctctgcgaagttcattccactggttgccacccattcctttcgtcttaacatattctttccagcgtgctttcgggtcttcactgatactaatcacggtcattctatccttataagtatctatgaccttctccatttccgggatcgactccacacaaggaccacatccgctactccagaaatccaacaaaatgaatcgtcccgcaaattcggatatatggcggagagagtcattcacgtcatatagttctccgtcaaccatcatatctcctattcctgccacagaaggaggataaatataggccgtaatctcctgtccggcatccgtttgcttctcggtttccggcattcgagcatacaagctcttcacttcttccttataaggcatgacagtttcgtatttcatcatagaagcatatagcagcagcttatctatccacactttagagataggcgcctctttcatatattcaagttcctttttccagatttcttgctgtaaaggcgttgtcaacttccggatagagtctatctttgcccagcctttcttttcaaattcctgatcgcctgcatggtcgagaaacatcatccgctgccagtcatattcggccgccaaatgctgcatcagttctttttgctgagccattgcacaagccgtaaagcgattttcttccgcctgttcggggatatcgctcaccacttcccaggttttcagtaatttgtcctctcctttgatttctatatactcccccggcgctatccatacttccagccatgtgcccgggaatcccttattatcagacattatcagcattttctttgtaacagagacagtatcccggaaagaaaacttgccattcagaagcgtatctctcgccacaaggttgaaaatgtttccttcatccacatacagccctatcactatactatccgaaagatttgccagctctccctgaatcaaatattcgtttgccggaactgttgctttccggtcggatgtacaatgacacatcatcaccagcaccaccgccaataaaaccggaacaattatatattttctcatatatatctttttatggtatgtaccggattacaatgcttcccggaatatctcacccaccgttggatgagggaagacaatcttcttccattgcgccgccgtcaacccaagttcaatggccgttcctgcaagggttattatctctgaagccgggttacccaacacgtgcgctccaatcacccgctcctgttcatccagcaacaccttgcaaaccccgttcactccttcgttctctgctacaaaacgaccggaataagccattgggagctttatgacttgacaagtaatgccttttgctgaagcagattcttccgtttcacctaccccggcaatctccggattggtatagacaacccccggaatggcacgatagctcatagtgtcttcttttcccaaaatagaatgcacggccacctctgcttcacgaacggctgtatgagccagcaaggagaatccggtcaggtcaccgcaaacataaacaccaggcacggaggtctgcatcttctcatccactttgacagccccacgttctgtcttttccaaattcaggttttcgagcccgaaaccttttgtcacaggacgacggccgacactcatcaacagcttctccgctaccacactgccacttccttccgcattctcataagagacaacagcagctccttccgtctgcgacaggccgacaactttcgtactaagcaggaatttaatgcctcgctttgcatattccgcacgcaacagagcagaaagttccttatccattccgccgagaatctcatccagcatttcgactaccgtcacttgcacgcccaagctattgaagaaagaagcgaactccattcctatcactccgccaccgacaatggccagagaagcgggcagttctttattatccaacgcgtcccggtgcgtccagtaattcaccgtttccactccgggaatagggggaataaaggtttccgaaccggtgcaaagtatcaggttctcaccttcgtaagtctcctcaccgcagcggactgtattcttatctatgatttgtgcttctcccgatactatcgcgacattgttcgaagccaacttcgccttcacccccaataccagtttacgcaccactttgctcttacggacaataatcttggataaatcaaaagagacttcggatacgtttatcgcatacttcgacgcgtgctttgcactatcataagtttttgccgaatagagcagagtcttagtcgggatgcatccctcgttcagacagacaccgcccagattgttcttttcaatcaataatacactcaaaccggctttgccggcagattcggcagccgtatatcccgcaggaccaccgccgataataatcacttggtatttcatagtaaataaattatttagttcattttcttttcaatcagttcaacaaattcccgttctttgacaggcatgacggaagcaaacttgtctttcccatactctatcaatatgtaatcggtcaccgagaaactcccgaatttcatagaacggtacctttgtatagtcgtaatttcggaaataggaattaccttcttacggataaagcgtccacgggatatttcaatatttccgttcgtagtgaccgtataggcggtatgtataatctgttcgatcactacaatcagcatgagcataaacagcacagccggcaagatatatttacaccacaaagcaccgacggcatttacagtaagcactgccaagaggaaatactggtaccaggcgatgcgggcatgaaaaattcgattcattttgtcagatttttgcctgcaaggtagcaattttatgaattagtgacaacgaaaagtacaacgaagtaacttattttgtagctttgcggtgagaaataacaaaattatggtaagaaaattcgatttcctcgttatcggctccggaattgccggtatgagttttgcgctgaaagtggcgcacaaaggtaaagttgctcttatctgtaaaagtgggctggaagaggccaatacgtacttcgcacaaggtggggtagcgtctgtgaccaacctgctggtagacaatttcgacaaacacattgaagacaccatgaacgccggcgactggatcagcgaccgtgccgcagtggagaaagtagtgcgcgaagctcccgcacaaattgaggaactaatcaagtggggagtggacttcgacaaaaatgagaaaggcgaatttgacctgcaccgcgaagggggacactctgaattccgtatccttcaccacaaagacaatacgggagctgaaatacaggatagcctgatcaaagccgtgcaacggcatcccaatatcacggtaatcgagaaccagtttgctattgaaatcctgacccaacatcatctgggagtcaccgttacccgccagacaccggacatcaaatgctacggtgcttatatcctcgatccgaagaccggaaaagtagatacctatcttgccaaagtgactttgatggccaccggtggagtaggagccgtctacaagaccacaaccaatccgctagtcgccacgggagacggcatcgctatggtttaccgcgccaaaggtacggtgaaagatatggaatttgtacagtttcaccccaccgccctttatcatccgggtgaccgtccttctttcctgattacggaagcaatgcgcggctacggtggcgtactccgtactatggacggcaaggaattcatgcagaaatacgacccgcgtctctcgcttgccccgcgcgacatcgtggcacgtgccattgacaacgagatgaagaatcgcggagacgatcatgtttatttggacgtcacccacaaagatccggaagaaacaaagaaacatttccccaatatctacgagaaatgcctgagtctgggcatcgacatcactaaagattatatcccggtagctccggccgcccattatctctgcggcggtatcctggtagacctgaacggacagtcttctatcgagcgtctatacgcagtaggagagtgttcttgcacaggactgcacggcggtaatcgcctggcttccaactctttgattgaagccgtggtatatgccgatgcagctgccaagcacagtctgcaagtcatcgaccaatattcctacaacgaaaacatccccgaatggaacgatgaaggtacccgctcaccggaagaaatggtactcatcacacagagcatgaaggaagtaaatcagattatgagtacgtatgtaggtattgtccgcagcgaccttcgcttgaaacgtgcctgggacagactggacattatctacgaagagactgaaagcctgttcaaacgtagtgtcgcttccagagaaatctgtgaattgcgcaatatggtgaatgtcggctatctgattatgcgccaggcaatggaacgcaaggaaagccgcggattgcattacacgatagattatccgcacgcaaagaaataattatgaaaacattagctcaactctttatttctttgttctgtatgataggattagcttcctgttatacaggcatcccgctaaaaagtgggaaatccgagaacaacagaacctacgaagtaagttatctgtttgagcacgacggaataaaagtctaccgtttttttgatatgggaaactatgtatatttcaccacacggggagatgttactagtatcaagaatgattcgacaggagaacggacaattaccatttacaaagacagtatccgaaataaatagaaaatgaaggtgtgtcgtaatacacgatgcgccttcttttttttcattgactataaaaatcggttcattttctttaa

SEQ ID NO: 3082 - DNA, 4055 bp, Unknown
  gut microbiota DNA sequence
ttagtgataggatatatcttttgtcttccccggcaactgtttcatgttccctactctaccgttgtgacagacagaaatggagagttattaggagcacgtatcgcttccgacggtcaatggagatttcctccacgaaagacgacacccgagaaaatcaggcaatgcctcattactttcgaagacaagaatttctattatcattggggagtagacccgttatccatagggagagctacttatcagaatctaaaaaacaaacgtatcgtcagcggaggcagtaccctcacaatgcagacgatccgcctggcccgcaatgagtcacgaactttcggagagaaagtgattgaaatgattcttgccacccggttggaatttcgtgcttcaaaagaagaaatcctgtcgatgtatgtatcacacgcacctttcggaggaaatgtagtaggattggatgcagcatcctggcgttatttcggtcactccgccgaggatttatcatgggcagaatccgccatgctcgccgtcctgcccaatgcccccgccatcattcatttgtcgaaaggacgaaaaacactacttgccaaacgaaaccgtctcctgaaacaacttcttgataaagagattatcgactcatcgacctatgaactggctgtcagcgaaccgctgcctgacgaacctcatcccttacctcaaatagcgccgcatctggtcagccgattctatcaggaaagaaacggccggtattcccgcacgactatcaacaaaggaatgcagactcatatagaggatttggccgaacgctggagcaatgaattcaatcggagtgacattcgtaacctggctattcttgtgattgacattccttccaatcaagtagtggcttactgcgggaatgtacatttcgaccggaaacaaggaggaaatcaggtagatgtgatccaggctcccagaagcactggcagtatattgaaacctttcttatattatgccatgttgcaggaaggaagtatgttgcccgatatgctattgccggatgtgcctgtcaacatcaacgggtatactccacagaacttcagtatgcaatatgaaggagccgtacccgcttcagaagcattggcacgctcattgaatatcccggcagtaaccatgctgcaaagatacggagtacccaagttccacaacttcctgcaacaaataggattcaaaacgatcagtcgcccatcctcccattatgggttatcattgattttaggaggagcggaagctacgttatgggacgtgacgaacgcctatgcgcaaatggggcgaagccttgtcaccggacattcggattcagaaactcccgtttccgccaaagaagcggaagcgagaatgatagtagaagaagatactaaaaacagggccgtacagcataaaagtatctgggataaaggtgccgtgtggcagacattcaacgctttgaaagaagtcaaccgccccgaagaaattgactggaaagctatcccttccatgcagccggttgcatggaaaaccggaacaagctatggtttccgtgacgcctgggcagtgggtgtaactccacgttatgcagtcggcgtatgggtaggaaatgcaaccggagagggaaagcccggattagtcggcgcacaaacagcaggtcccgtgttattcgacatattcaattatctcccttcatcgtcatggttcgaacgcccgacaggagttttcattgatgcagaaatatgccaccagtctgggcacctgaaaggaagattttgtgaagatatagatacattgctagttctgcccgccggactgcggacagaagcttgcccttatcatcatcttgtcacactatccgccgatgaaagccggcgtatttatgaaaactgtgcaaatacagagcctactattcagaaatcctggtttgtcctgccacccgtatgggaatggtattacaaacaacatcacccggaatacaagtcgcttccgcctttcaaacccggctgtggggaagacaccttccaagcaatgcaatttatttatcctccgatgaacgcccgtatcaaactgccccgacaaatggatggcagtaaaggttttataacggtggaactggctcatagcaatcctgacgcaacgatcttctggcacctcgacgaaacttatcagacgcaaacgcaggacttccacaagatttccctgcaacctgctcccggtaaacattcactgacagcagtagacgatgagggcaatacagtttctactactttcttcgtcgaataaacagcttatttattatctttgcggcatgaaacagccattaaaagaaaacggaggactaccggcgtctatcctctggacacttgctattgtggcgggtatttcggtagccaatatctattacgtccaacctctgctaaatatgatacgccatgaacttggcatatcagagttccgaactaacctgattgccatggtcacgcagataggttatgcggccggactattgtttatcactcccttgggtgatttataccaacgcaagaagattatccttgccaacttcctcgtccttatattctcactattgacgattgccctggcgcataatatccatgtgatacttgttgcctcattccttacgggggcctgttctatgattccacagatattcattcccatggccgcccagttttcacgtccggagcataaaggcagaaatgtaggaatcgtcttatcgggattactgaccggcatcctggcttcacgcgtcgtcagcggactcgtcggtgaactgttcgggtggcgggagatgtattatattgccgcaggtatgatgtttgtctgtgcggttgtcgtactgaaagttcttcccaacattcagaccaacttccggggaaagtacagcgacctgatgaaatccctgctggctttggtgaaagagtttccgcaactacgcatctactctatccgggctgccctgaacttcggttcgctcctcgccatgtggtcctgcctcgctttcaaaatgggacaagctccattcttcgccaatagcgacgtgattggtatgctgggactttgcggagtagccggagcattaacagcttcttttgtgggaagatatgtaaaacgggtaggcgtccgccgcttcaacttcatcggctgcgggttgattcttttgtcctggttattgttcttcgtcggagaaaacacttacgccggaatcatcgccggcattatcatgattgatatagggatgcaatgcatccaactcagtaaccagacgagtatcttcgaactgaatccccgcgcttcgaaccgtatcaatacaattttcatgactacctacttcatcggtggctccatgggaacattccttgccggaagtttctggcaactgtatggctggcacggcgttatcggtatcggagtccttttaaccggtatttctctattaattacgattttctttaagaagtgagtcaacaaaatggatgataaaaccgtttaatacaaaaaatcagtaaactatgaagtacggagttaacagacaaatcttactaatcatagccggcaccgtctggattattgcgggcggaaacatcctgcggataggaatcgtcacctggatgaacaactcacacgactggatgtttaagataggggaagccactatcgttttcctgttattcttcgtactgatttttaaaagactctactacaagcatacccgccggattgaacagaagaaagaaacccgcaactgtcctttctctttcttcgatgtaaaaagctggataatcatgatattcatgatttctctcggaattacgatccgaagcttccatttgctacccgaaagttttatctctgtcttctacaccggattgtccattgcgctgattctgacagggatacttttcatccgctattggtggctgaaacgtaaaaccatgctcaactaaaggttagctctttctatattccaagaaaatataaacttataataatttttattgcccgctcccataatgcaaaagatttctaccttt

SEQ ID NO: 3083 - DNA, 397 bp, Unknown
  gut microbiota DNA sequence
gcaacgtggggtacggggctcggaagcacggcacactaccaccatgcagtattatcgggacttgaaaaagaaaaatgaaacccttgaaaccgaaaccagactgttacaggagaagaaagccgaggcacaggaggaactgaaacaggtaaaagcggaaatccgcaccgacaagctcaaaagcgcagccaccgatacggcaaccgcccttgcaagcagtgtgggttctcttttcggaagtggaagaatgaaatcgttggaacgcaggaacgaggacttgcaagaccgcatccttgaacttgaagacgaagcccgacaacgggaacggcaacaagccgaacagatacaggagataagaaacgcttacgagcaacagcaccgcaagctgtcggagtttacg

SEQ ID NO: 3084 - DNA, 652 bp, Unknown
  gut microbiota DNA sequence
tttcaagtctccccaaggttgatacaggaaaacgaataataacagccaaagaaaagcggttttacccgtataataaatgacaaaggcaatcagtcccataaaggcaaccacgataatagcgtgggcgatgtattttaaatttttatctttcattgttcaaacatgttatactgaattgaaaaaccgaatttgcttaatctcctttcctggagaagggaacgtttgtcatgtgaaggcataatggccaccaggttctttgtatcgaactggtaacctttcttccgcatctgataacgtaggtttcttaggcgtctgtcttctttcatggcatttcgttaagatcgtcttagtttatagaagacatggcacactatcgcaaaggatagcgtttaaatcctcctgtatggtttcctgctgctctctgttcaagtgtaccaggaaataaccttttccgccggaaagattcttaatctccgccagattatacttcctgtctaccgcatccacgaacgcaggggattccatggggcggaagctactgaatattttataggttccactactgccttctattcgtagcgtggttaattcatcaggggtggtaattgttgatttcatttcttatttatttttaattattcgacttgttcct

SEQ ID NO: 3085 - DNA, 552 bp, Unknown
  gut microbiota DNA sequence
ttacacatataatctacatggatcacctgattcattgccattcccggaactttgatggagatgtttgctctgtttggacatacatctacacaattctcacagactttattacaggtcagacagcgctcactttcgctcgcagcgtccttgctttctttgagtattgcttttttggagtaacagtctttttctgttcccggtacaggctgtccttttacaatatcatgtccaaggattgcttttgcagcaacctgtgcgtcgcggatcgcttctacgatcgtagcagctccccttgcaccgtcaccgacaacgtaaacgccttctgcacttgtctccattgtcttatcattgatgcgggcttttccgcgctcattgaccgcaataccatttgcttcatagaactcagtcggaactttctcgccaactgcaacgatcactgtatcagccaaaacttcttctgtttcgcccgtttctgttacacctgcacgtccggaagcatccatgctgccaagttccatcttcttacagagcagtttgccgttttccagagat

SEQ ID NO: 3086 - DNA, 5666 bp, Unknown
  gut microbiota DNA sequence
atatgcatttttctcaccaataattgcatttactatagtcttataaataatgtataaatccagtaatattgtccaatgttccatataccaaatatcagactgaacacgaccttccatttgagacagttctttcgtttcaccacgaaaaccatgagtctgtgcccaacctgtcactccaggcttaataaaatgacgtaccatatacttatcaatcaatcgcgcataagtctctgtatgagctaacatgtgagggcgaggcccaactatagacatctcacctctaaagacattaataaactgaggaagttcatctatattagaacgtcgaaggaaatttccaaatttagtttttcgaggatcatcaaccgttgcctgttttttgtcggcttcatcattcactctcatagagcgaaatttatagcatttgaattctctgccattcaatcctgtcctcatttgtttgaagaatacagggccgggagaagtcaattttatgatagttcccacaattaggtaaataacaggaaaaacagtaaccaaaaaaataccggataacataatatcaaatagccgtttcaagaaacgattctctactttacttaaaggttcgtatctcaaattcaaaatcggcatattacctatcatactatgccaaatacgttgaggaaatcccttacaaacattaggaacaccatgaaaataaagtaaatggttctcgcaatagtttataataggaacattataatgtccctcatccattgccaaagaacagaatacatgttttacggatgtttttccggacataaaatcagcaaaattgtccggattgccaagataacggcatcgaggggagaaagtttcattcggagtaacatcaaaataaccgacaacttcataaatggcagccaaagagctttccatttcctcatacaacgtatgcatattgtctcctccacctataaaaacagcataacttttatgtttacctttcgcacaataatcaatcagcaaacgacgaataattatgcgataaacacttaatacgacaaaaaggataaaaaaatagataataaaaaatagaggagagattatggagattccactaaaagccatgatacatgcccaaaaaaacgaaaagatgataatattcttcagcacacgtaccacaagctgatcagcacgaatcgcccggctattccatgctctaccgcgggacgccgagcatgccaaataacagagacttaacgaagtcatcatccatgaaactctgcaggaaaaaggtaaagatacaaatgtttcttcccaaaagaaaaggagaaagaataaacacaagttcagaatgatcaaatctcccaatactgcaataaactctacgactttatttatttgactggttgttgataccatatcacattaaatattgattttaggcacggatttctttgaacttattcagaatatcttctccaaataacttccaagagataacaatacaaactgataggaaaataaaagctaaaacatatatttttctactggttcccgaaggatataatgggataaccgcaggctctacaacagcaaagactggtttttcctcctggactttggctctggctacttgaagctggttagccacctgactatacacttggtaggcaaggctcatgtcattctgcaagcgttcctgttcggcacgaacactctgcaaaatgatattatcatgagagtccatataatcggcatatttcttctgagcatcgtaatattcctgctgacgctctttaaacaatctctccaaataaagacaatcttcttttgctttggaagtacgataatctatgatatattcctgcaatttccttacgacagaatcagctactactgcggcaaccttgggattctgtaaagtcacggaaactgtagtcattgaagttttcttatctacagaagcaagaatctttttcttgagtgattcaatctttttcgattctttcttagataattcgattgtacccagatttgccttatctgaaggtactaattcagactcttcttcagtaaataatgattttaccccaccaattaccatacccggaagtccgattacataactccaccaaggagaagactcttcatccaaataaacatttaaggtcatagtttcaccttccaatgctggaattttcatagtggaaagttccaacaaaaaaggagtagaagatacaatatcggcagacaaagaagcattcaaggcatcagttccttcatttatagccattccacttcccaaaaaagaagctgccaaaccggataaaccgccggctttagtatttcccatttcaggagaaagagtaactccaaccgtatattgtttgggaatacttatagctacaatgatacctataaccaagccaataccggcagctttgtaaattgtcttacgaatgcctataatcttacgaagaatacctattaaatcgatttcgatttcttcatcattgtgattattctgtttctgctttatgtctttttctgatgtctgttctatcatagcgagttaagatataatcgttatttcttgattaaattggcaatagaagcaatcatcattcccaatgaactaaaagaggtggcataacccaatatattgccaatattagtccgcttcttcgccttactgggaattataatctcacaaccgggctcaacctgtttcttgccactacccttcaccttagtcacctgaccattcatataaacaatgaacttcttactcttcttcgcattctctgaataacctcccgcctgattcaggtagtagtctacatccttgcctttcatataagaaacagtattaggaaccatgacggcaccattgattgttaccgtattattattcttcggaatagagactacatcaccctcacgcaacacaatatctgccgtacttccgggattggccaacgccttctccaaatcgataccgaccgtaaacgtatcctccacgcggacacccagggaatcaagcatagcctcacccaactgacggctcatcaaacggattacatcacccatacgtttcttctcactcgcattggctacacgggtaagcttcgcaccacgaagataagcgtagttggtggctccgccggctttattgatcaagtctgaaagacgttcctccctgctggtcatcgcataggaaccgccgaaaagtatttctccttcgactgaaacattctgttgaggttgataaccggggctgcgacgaacataaacctcatcgtagggctgaaggacaaagccggggcggccgtcaactacaaaaccgtcctttaaggcaaacgtatacatctgaccgatagtatcattatcaactgtactatacgggttctttattctgcgggatacatcaacacggactacggaagcggcttcacgcagaccgcctgcctggatgatcaggtcttcaagggtcatgttatccgcataaggatacgagtcaggctgagccacttcaccgtggatgaccacattacccctgtcctccaggtcatgaatgctgggaatataaagaatgtcattcttcatcaggggaagattgggggaagtaccctccatgatagacttgatatccagagggattacttcggaagtcaggtcctcacgctgacggtaaaggacggcacggttcaggaacgcatcaccggtaaggccctgggattcgttgaccagttcgcggacggtattcagcctgccgttcagttcgtagataccgggacggtagaccgcaccgcggatttcaagcttgttgatgaagcggttaaggatagcttcggccgtcacaacatcgccgttgcgcatcttatagacactgtaatccatgtccttgaccgtgttgacttcatattcctgaccgttctggcggaccacacgcaaagaacgggtgtaggcgtcggcttcaaagccgccggcatagctgataagcgtggaaaggttctcgtcctttttcatctcaaaacgcatcggacgtttcaccttgccgtcgatcttgaccagtacctcataagcgggaactatcacaacgtcgccttcctgaagacggatatcgtcctgaatgttacctttcatgataaactggtagacgtcgattgtagcgatgttcctgccgttacggaccagttggacattgcgcaggctgccgatgtcactcacacctcccgcacggtaaagcgcgtgaaagacagtggcaaaggaggaaagggagtaggtgcccggctggaccacttcacccatgacattgatctggatagtacggatgctgccgagtgtcagacggatgtcagaggtcgggtcgttcgtattattaagaccgttatagatcttgtttaatgtcttcttgagatagtcgttcgcttcagcgatcgtaagtccgttcaggttgacggggcctatcttctggatattgatagtgccgtcgggagagatctgctggcggatagtattctggctcgccccccagatatcgattatcacttcgtcaccggggccaaggcggtaattcaagggggtggcgatattgacactgggctcgaaggtcagattacgggtgttgaagatgttacgtccgaagacctgattaccgcgtgcgaggtcttgggtactagggtggtcctccaacatatccgaggtgttctccttcatctcttcacgaaggcgggattcgttgatatccgtacccgtggcgttggaaacgttcacgttgttctgctgctcatagagctgcttcacacgcagggcctgctccttggttacacccttgcgggctaactcggaggcaagctgtttttgctctttcccttgtctaatcccctctttgacatattccaatacttgagagtcgctcatattttgagcagtcacaggtgtagcgcccaacatcaatatgaggatgagcgcacccattagtttttgcattttcattgattaatctgaatttttaaattcaatcgaaagtactaaaccggctccacacatcctgccggtatatctacacacgcacatcccaacattgtcagtcggacggcgacttttgatttcccattcatatctaccagttccccttccagtcctgccaatggcccctttattacacgtattttttctcccggcgctaatggcgatgtgctcatacaaatcgtttcgtccgaatagtcgagcataaatttgaatcgtaacatttgttggtcgggaattacagccggagtactctccccacgtagtaccatgtagcggctgatagcggataaggtcagaacttctttttgttcttgtggatcaacgtggacgaagatcatcattggaaggatgactctgtcgacaaccttgcgacggtcactccagttatgaacttcttgttggataggaaggaaattttcaacgcccattttagtgaggcgctcacttgtctttttctcatgatggatacgcacaatggcgactaaccagcgtttagagtgcgctacgcttctgccaatcacatctgttggcagaacatttcgatcgtcatttttgctaatgatcatatttttttaccccactttttccattgctacttaggcaatgaaataattcctgctgcaaagataggcaaaataataaat

SEQ ID NO: 3087 - DNA, 7754 bp, Unknown
  gut microbiota DNA sequence
ggaaaaaaaaaaagaatgtggaaaaacggaaaggaaagtgcggaaaccccgtgatgttttccaccatgtgtatatgggaaaggggtacgttatatttctttaacaatatgaaatagtgaattttgccttattttgtgtccttttatgtagacacacagaataataagcctatttgtatgaataaatttacaatagacatagacgaaacatttaaataccattatcgttcgttatgcttgtacgtgctgcactatgtccatgatacggatattgcagaagacatcgtacaagatagtttttctgccttgtgggagaaattaagtatcagtggagccgagatagaaaatgtcaaagcctacctttatacgactgcccgcaaccgcagcctggactatctgaagaaggaggagatttatgatccgaatctttccccttctgattttgaagatacgttgagcgatgaggaagcggaggaacgttcggtcagggaagcgcggatgtggactgccattgatgccttgcccgaacgctgccgggagatattcctgctgaacaaacgcgacggcatgaaatacagggagatagccgccaagttccagatttccgtaaatacggtggataaccacatcagcaaggcgctccgactgatacgggaagggacacagaaagtttacgcattcttatttaactaatattcacaaattccgcatagtgaatttgtctgtaatcccagtcattaatacgaaaaccaaaataaaagagtatgagaaccacggatgaaaaatgccttcattttgtcttgcgccactatcagaagaacaagttggatacgcaaaaagcattgaaggctttcaaagagaaataccagataacggaacaggaacggaaatccttccgcttgtggtggatacttcccggtatggcggcagccattctggtcgcagtccttatttatccccgcttccgggaaaacggagcatggaaggaggtaacggcttactcgcaccccgtggattatatgcttccggacagttcctccataaccctgttcccgcattcttccgtccgtttccacgcaaaagattaccggaaatccagccgcaaagttcacatggaaggaaaagtcgcgttttctgtcaagcatgacaatgcccacccgtttacggtagaagggaaactgtcccaagtcagggtattgggtactgtctttaccgtcgatgagagccgtgcagacacagctatcgtgcaagtcacatcgggaaaggtgcagttctcagcaatcgggcaaccggacgttgtgatactgaccggaggcatggcagcgcaagtgacggaagaacaaccggacgtacaggtaatcaaagaacggaaagcgggcagctttattttcgacaacgccccacttccaaaggtacttgaggaattgtcccgatattataaagtcaaactatccgcaagcaatgagaataaacgcctgacggccagcttcaagaacaaaagccttgatgaaataatcaggtttatagagaaagtgttgaatgtaaagatagaaaaagtaaaacaatgaagttaacaatcattgcgattatattgtgtgtctctctgggtgctaaagcccaacaggattcaaccgaaatgaaaaaagccatagatgccatgcaaaaaatgtattctgttcatttcgtatacgattcttccttggcaaatataaagcccaaaggtatcttccagcggagcagttccttgcctgagaacctaaaaaggattttcagcggaaccggcatccgatgggagattcagggagaatatgtcctgctgttccgccagaacaactatactttttccggccacatatgcgaggataagggagaaacgctgatcaacgtgaccattttcgatttgaatacccaaacgggaacactgagtaacgaacagggatttttcagcattacgctgccggaggggaaacacaaacttcgtttctcttatataggttatcaggatgtggtgaaggaggtggatttgacatccaattacaacggtgtcatctacctgaaagaaagcaatacttcgctgaaagaagtagtagtggttgcagacttgaacgcttccctccgcacgacacagaccggcaaagtgtcgctgacctcggaacagttgaatacggagttttcgctgcttagttcaccggacttggtaaagaccctccagaatattcccggtgtggcttccggaacggagctgctttccggcatgtatgtacacggaggcaagaacgatgagaacctttttctgctggacggaacaccgctttaccagatcaaccatttgggcgggctgttctccgctttcaatacggatattatcaaaaacgtggatttctataaaagcggtttcccggcacgttacggcggcagactttcttccgtagtggatgtacgcaccaaagaggggaacatgaaggagtttcacgggactttctccttggggctgctcgatggcagagtccagtttgaaggcccgatcataaaagacaagacctcgttcaacatagccatgcgaagaagttgggcagatcttttcacagctccggcattcttcctgctcaaccgttccaatcccgatgacaaaaagaacgtgcgctatgcctttcacgacatcaacgggaaaatcacccaccgtttttcggacaataataaactgtcccttagtgtgtattccggaaatgacctgctgaagacaaaagcccggcagacgttcgaagacggggaacattacgactccgatttcaaggctcaatggggcaacctgactacggctttgacgtggaactgtcaaatcgtcccgaagttgtccggcagtttcaccggtgtctattcacgcaatatctccatgtatgattatgtggaaggcagccgtttcttttccgacggggaacaaacttccatgacgggaatggaacggtccaaccgttccacaatcgacgacatgggataccgcatggagttcgactaccgtcccggcacgaatcatcatatacgctttggcagcaattatctgcatcacatatatcatccgcaaagcacggcttccagaaaccagacggacagggataccttatcgacagaaaacgcaagcagctataagggtaacgaggtcgctttttatgtggaagatgaaatgcggctgtcctccaggacgaaattaaacgcgggactgcattacaccctttatcagacagacggaaagatgtaccattccttggagccaagactggccatgagttaccaatgctcggaaaaagccacgatgaaagtgtcctatacggaaatgagccaatttgcgcaccaactgtcaaacacctatctgaacctgccgacagacagttgggttccttccacacgcaaagttcgtcccatgcgttcaaggcaagtggcagccgggatatatacggagttgccttggcatatcagtttgaacgtggaaggatattaccgtaccacaagccaactgctggaatacgacgggggcaacagcctgatgcttcctgccgagaactgggacaatctggtcaagaccggcaagggaaagtcttacggcgtagaattgtcattggcatacaaagaccgttacaatgtcatcgaagcaggatatacgctttcatggagcttgcaaaagtttactgatttttatcccggctggtattccagcaagttcgacaaccggcataaactgaacatcgcctaccggcataagttcaatgaccgtatagatgcctacgccgcatgggtttaccgtagcggcgaccgtgccaccgtcccgaaccagtatgtaaacgggccctcttttccgggcataccggattcaggcgaaccggaactggtttacgagaaaccgaacaacatcacgctcccggcatatcatcggctcgatttgggtgtcaatttccggcgtactaccaaaaggggattcgagcgtatctggaacgtcagcatttataacgcctattgccgtatgaatgcgttttatacccggatagagcgtctgcccgacggcggtttcaggggtaagggatttggcattttcccgattataccctcgtttagttataccctcaaattttaagtgcatgaaacatttatatcatatattactgcccgtgtatatcggcttactttcgtcctgtacctatcattttgaactggacgatgtgggcgcttctcccaaactggtgctatacagctatccgggaagcggcgacacaacggtagtccacctttcacgcagccttcccgtcagtcagaaaggcgagctcgtccggggactgaagggagcggacgtccacctgtccgtaaacggtgaagcggtaccccttgcatggacggacgattccataccgggagtccccgcccaaagctattacgcggtaaaggcgtatgaagatggcgacaaggtcaacataaccgcagcggcagaaagaatgaaagcggtttcatccgctacggttgtcccgtcccgattccctttgacatcaatcaaattggctctcaaagacggtgaaccgaacctgcttcagtttcggataggctttacagacaatgcgcagacaaaagactattatgcgttgaaggtggagcgtaaacaactgttctggaacgatggcaagtattcggaagaaagcagtaccctcgcgttgaacttggacgacgaacctctgctgaatacatcttccgggttagacgatatcctgatgattgaaaacgggttctaccggaatttgtattactgggacgatacgaaaattaaagggaaaagctacacggttcgtctgaataccaattacgaggcagactatgaagacgacttcataacccctgacggaaccgaacatatcaaacgccaagtgaaatacagaatcagcctgtacagcctttcggaagagttttacaggtatctgaaatcactgaacgaccagaaaaacaacgggcttggaaactctgaactggctcccatacgctctacttacaccaatgtcataaacgggataggtgtcgtgggaggatgcaggatgttccagacgaaatggatagacaatttacaggaaaactaaataataataaaaaaaatgaaaaagacaattttatcaatgcttttcttgctggcaggaataggatgctttgcacaaaaatccggcattatcatcggtgtgacggacggacatttgggaaaatattcgggatatgcttacatgagtacgggaacggcgaacaactcttcctaccccgaaacccgatggacacccggagtaggctttaatttgggctaccagtttggcttcgatctttccaaccgtttctggattgatgcttccatattgggaaaagccgttcagggaaaagcagagtccttcgatttgaatggaaacaacgttgttccctggtctgacaaggcatggatatggggacttgctttgaacggctcaatcaattaccgcatctgttccggactgtatgccggtattggcattgaacccaccggttatttcaaaaccgataaattgaaggaaaacttggaagggcgggttttcgactttccgatagtcctcaccttaggctatgagtttaagaacggcatgaaattgtccgcttcctacaagcatggtttcaagccattgtatgacaatgcttttgcctccaatacaaagaataacaaagagttcggcatatcattatatgtgcccatgtttaaataataaccaattattaaattttttcaattatgagaaaaacgctttttagtcttgctttggcaatggctgtcttatcatcatgtagttctgatgacatagtgaacaatccgatgaatgaggagaaccattctttcccggcctccagaagtttgcatgaaaatattctttccttttccagtgaggaggaatacaatgccttgctcgattccttgggcacgttgtccgatgaggaacttctgcaatgggaatccggacagaaaggcttcacctccatgtacaggatgcacagcgaagccttgggacagatattaaacgccacatgcaaggaagaatatgaatccattaagactgcttaccagactgattttatattcaacgacaaggacagcaccgatttgtcgatatatatgccggtgttgaatgtaagcaaggcaatcacattgacccccgaagggttcgtatgtatcgccggtgagagaaagaacatgaaggagtttgaaaattatgacggatataaaaaagaactttctttactttatcctgtcccgctgggtgtaacgatcgaaaatggtataaacagggtttacgtgaaaacgaagaaaagaaagttcaccgcacagattggtatgcgaggaaaccaacaggctatccgtgtaaatgcgtctaaaaaagttttatggggctgggtggaatatacgactgcgtactattggaaatacacgcctaacggccctgtacaatttggtaaagaagtgaaaagcggtcatgacattatgatcgtgggcaatcctttcccaaatggagcgaaattgtatatgtggactcgcggtaccggtgaagaaaactgcggaataatgactgtgcaattgtaatccttattgaaccggattattcaccaatcattcgggacgaatctctgatatagccaaatgttcgtcccgaatattaaaattatcattttatgagcaggaaagtatttacttgttttatagtgattttcttttttctaaataaagccgcttcttacggtcaggaatttcaagtgtcgcgtgacaccgtcaaggtttccgttcaggaaggaaatacttcgcctcataacgaaagaagcattaccccaaagcctttggatatacggaaagcggttgatctttcttccggcagttgcccgtcccagataacatttgacgtgcagaacccatataatccgacattccctaccgacaaatcgcctttgcatgagggggaatattcgacctccggtatcattaaaagctatccttccggctatttttacggcataggcaggcaggaaaacttcatcggcttgggaacaatgaactatgcaggtatcggatatgtatattctcccggttgctggtcatttaacttgcaggcatataccgtaaaatggagtgtccccagacgcgagagtcagctattgggattgtccgggctgttgacatatcccgtcaacgagaaaattcgtctaaacacatttgcctcatactccttcattctttcttctcctttcagttcctcgaattacgggggattcgtttcctatgacatcattcccaactgggggatggatttcggcgtcagaagccataccgattttccgttgcataaaacgaaaacgcttccgatagtagctccgtattttcagtataaaggcaacaaattgggtattgatatcggtggcggattatttaatttgctattcaaataacctgcactgatttctatcgttactcctgaagcgaggattataagataaaggtattatcttttcatcgaaaaacctcttttctgctgctggtcataattcccttccaccacattgtcaacttcccgtctggctttgatttgctcccggttgtcaaattcacccttttgcctggcagtgaagtacaggaaatcccctgccgcctgatgtgattgtctgtcatccccgaacaggttaagggcgttcttgatgtcatatacctgttccgtgtcaaaacgg

SEQ ID NO: 3088 - DNA, 783 bp, Unknown
  gut microbiota DNA sequence
acggatgatactgtgtaccgccttgcggaagatgtcgcttgtttttagcagcaggaaactgaggcagccgataatatggctttgccatgcaatccggttcttgagtctcgtagtttcctgtacatgttccgtttccttgcggttcagttcggaccggtgtttggcctccagttgcatcagctcacggctgtggtcgttctgtatggtctggattttatcctgcaaccgttcgatggtttcctcgtgcgtggaaatctcacagcgcaaatcctctatttcatttttcagggctttcgatttcccggtagcccagccgacagcggcgttcagaagttcacttcctttttccttgttcagtctggagcgtttctcgctgatagccctgtcaaggtcttcactctgccgttccttttcatttgccttttcgataagggcgttggtaatgctttccgtttcatgcatctttttgttcgccatttccagctcatgttcccggtattgcctcgtggcatcaagccgcttcatttcctccttctgcttcccaatgataaagtcgttacgttcctgatgttccttgcctgtaacagcctttgactgcccacgctccatcaggagtatgtcggatgccagattctgcatttctgtcatatccttgtcattgagcttgcagctcttgcctgtgtcatggttcatccagtcaaaaacgatatgggcatggtaattcggcttgaaccatctttcgccgactttgaaactctccctgtcttccgcttccggctgacc

SEQ ID NO: 3089 - DNA, 227 bp, Unknown
  gut microbiota DNA sequence
tcacaaggcttggaacgcttttcgcaaggttcatgaagccggtgtgccaaaatttcatcgtaaaagctatgcttggcaataccagaccaactgtcaatatccaaaacaaaagacggcccggctagacaacggtaccgtctgctttgaagatcgcaaacatattgtggtgcctaaactaggacgtttgcggatcaaaggtgctcagcagcgactattggatcgtcaag

SEQ ID NO: 3090 - DNA, 52585 bp, Unknown
  gut microbiota DNA sequence
acaaacctcatcccagcatacctcagacaagggattattctcaccatagcgagaaaaaattctcatcgtaatgagaaaaaattctcatcgtaatgagaaaaaattctcaccatgatgagatttttttctcatcatggtgagaatactttgagaatataatcattcaatccgaatactgataaaccttcaaatcgaacttaggaaccattgccagtaaatggtcgaagatatctgactggatacgttcatattctttccagaccttattacgggaaaagaaatatacctgaataggcacaccatacatcgtggcttccttctggctgataattaagtccaaatcctgattcaccacaggcaaactacacaaataccgttcaatatacacacggtaaacctgcgaattggtaggcacgactcctgcctcgggttgataatctgccattaaaggtatttcttttcgataacggtcgagcatttccggcgtacagaattggagggtagtcaagtccagggttatattcttcatcacccttcgtcctcccgattgcaccattccccgccagttctgaaaggggctgctgaccagagtataaggcggaacggtagagatcgtattatcgaagttctgaattttgactgtattcaacgtaatctcctgcaccgtaccattagctgcgccggaaggaagcgtaatccagtctccgggacgaaccatatcattggcagacagctgaatacctgctacaaaacccaatatggaatccttgaacaccaacatcagaatagctgccgaagcacctaatccggcaaacaagctggccggagacttattcacgataatagcaataattacaattcctccgacaaagaacaaaagtacctgtaacacctgaatgaatcccttcatcgggcggttcttcatcgactcctttccatcgtagatgtccattatcatcagcaaaatcccattaactgccaacaacaaagaaaagatgatgtaaacggcacaagctttctgggaaataagcaataaatccttaccacgaacaaaagccattggcagcaaagcataaaccagaaaagccggaatcgtatgaatcagattatgaaacaccttacgcttcatcaacaacgtgttccaaagatgtggtttccgacgggtgtattgcttcattcctcctataagaatcgcctgacacagataattcagaccgatagcaatcgctatcatcagcaaagcaataatagtttcatcaaaacgatcagctaccttcgggtctattccccaatctatcaggattttgttcatccactttcctaaatctactactagcataacttctgtcttttttaattaataacagtaaaaggttcatttggtttaataaaaaaagactggcgtctgattcacgagaaatcaagaccgccagtcctcactgctactctctaagcatatctttcaatgatgacaactccgtcagggggttatcttcactcctatttcattcatttccacttttgcggttgttgcggtaggcgtagtagcctccaacttaatatagcgtgcctgcactttctgaccgaaagcaacggtctgcggcaacgggttatgcataatattactgaactcaccgttggtaggaacttccttccagttcttgccgtccgcactcacaaagaatttataacggaaagccattgtaggtttcgcttccgctttcaatggagcataggtaaaactggtcaatgtcaccgacttgcccaagtctatcgtcaacggcgaagcagcgacctgtttccaaccggtacggggcaggttgttccaatcttcaccctgaacggttgcctgtaaaggaggcgcataataagcagccacttgattaatgtgagcagtcagacgacattcatcaatcttcacccgcagcctgccggcttttaccgccggaaaacgcagcatacgcttatatccgattgtcgtgcctttaccaacttctttccaaccgttatccgtcagagcctcaacggtaaaagcctctaccctctgccctttcgttatatcttcctgaagcattacaacattgatttccgacttcggcttcaaggaataaacagcttcactacccgaagtggcattccagtagtttcttccttttttcacccggttgtcagcaaatatctgttggcggtaagcagcaaattctttcagacgattcacatccgcctcacttatcaagcctttacgatcgggaggaatattcaacaagagcacggaattatagcctaccgaccggaaatagatatccgacagatgtttcaaagactttactttgctatcttccgcctcatgatagaaccaccccggacggatagacacatccacttccgacggataccagaacagttccgtggccttctccaacatcttacggcttcctaagtccgccgctttactaaagacacccaggcgtttgttgttttccgccgaacgggcataaattcccggagtgagcacagtggcattccattctgtttcacgtcccagtcctttctcatttcctacccaacgcacatcatcgcccataattgccataacagctttgggttgcaggcgttgaatcgttttatagaaagcgtcccagtcatatacttgtttctttccgttcggtccttctccattcgcaccgtcgaaccagacttcgtgcacttcaccgtaattggtcagcagttccgtcaactggcggataaaaaactcattatatcggggagaatctccataacattccgcgtttctgtcccacggagagagatagactccgaacttcattccatatttatcacaggctttccggagttctttcacaacgtctccttgtccgttcttccaaggagaagaggctacggaatgtttggtggtggccgtaggccaaaggcagaatccatcgtggtgtttcgctgtcagaagcaccattttaaatccggcatctttaaggctgcgcacccattgttcggcatccagttccgaagggttgaaaagtgcaggatcttcttttccgtctccccattcgcgtccggtaaaagtgttgataccgaaatggagaaaagcggtcagttccatttgttgccaggataactgttggggagtaggtatcaggcgcgccgccatatctactttctgttcaagagtcgcgttcgggggaaattcaacgtgcttcacataatattcttctgccttttgtgcctgaacactcaatgttatgacagaggataataatactgcggtcagtagtttgttcatgatataaaatttaattaatactgatagcgcaaagataacataaaggtgtgaatttcactactttcatagaacatttctgacaatattcagaaaagccagtaaaatccacacctattatatataatctaataacctattggttcaacacttattttaccggataaagggtaaattcaaagtgctgtttcttcaacggaaccaaatattgcggcaatacaccggggccacaagtagctgttcctacaccagcctgctctgcatccaagtgcacggtcaacattccatcacgtttcaggtcattgatatgacgggctttctctaataacacatccgagaaaggaatgatactaaactggaaagcacggtttgactcgacaaagatacctgcaccggagtgatccgtaaacttcgcccatcgtacatcagtacgattacccgtggattgcggagtgacataatagtggaacatacgttcgggggttgtctgatacagtccgattctaccggattggttacggtcggcatacgtttcattgtcaccacgtcccaaataggaaacttggtcatacatatcagccacgcggaacgttacccccaggcgagctattgatttcacaagtgctgtatccggttcgaaagtagtgctcactttcaatgcgccattcttatccagtgcatagatgaagtcagccgtaccaactttctgtcctttcgcgttgagtatttcaacacgggcagtcgttgaggatttgccttctttcagtgataggactttctgggtaatattatccagtcctgctttacgccacagacgtgctccgtttctatcacggttatcattatccgtagccggacggaaaagacttaatgtcaatggagtagataacagctctttgccgttcaggctcaacgaagtcagagctcctgtttttttatcaacggtaaatgttgtttcacctgctttttgcggacgatgagccgtagaattcttattgccggaaagtacaaactggtcataagccacttcccagtctttatctatcatcggggaatcctctttgcgggtccagctaacgttcagataagcctcacggtcctttttcgaaagagtcacattacccaactgtatatctatggtagcatgcggttcacaatccagcactttagtcccttctgccagtttctctccactatcggttgttacattccaatggaatatatattcattcagattagagaaatcgtaccagttcttgatacgaagtttcatgttcttccggtcaagtaaagtggtctttatattctgatacactttcttcacttcgagcagatgcggatgtggttcacggtcggcaccgaccaagccgttacaacagaaattaccgaaactgggaattccttgcggaccataatcaccgccgtaagtccagtaccatttcccgctcttgtctatttcgcggaaagattggtctacccagtcccatacgttaccgccttgtgccataggctcgctttcgaagacatcccaatattccttcaggccgccgcaactgttacccattgcatgcaggtattcacaaaggatgaaaggacggtaaatgtctttcttcgctacatacgcttttatttcgtctacgctacggtacatacggcagtaaatatccgtattataattcagttcggcacgttcatactgcacggggcgggtcttttctacagatttcagccaatcataagtacgttcgaagttaatgccgttgccagcttcatttcctaacgaccagataactatggccggatgattctttgaacgttcgtacatccggtgtgtacggtccatgtgggctgtcagccaagtactgtctttggcaagggaggcgggaccgtagcccataccgtgagattcaatattggcttcatcaatcatatacaatccgtaacggtcacaaagctgataccagtaaggatgggtaggataatgtgagttccgaacaaggttgatgttatgttgtttcatcagtttgatatccagttccattagttccttacttaccgtacgtccgagttgcgaatgttcgtggcggttggttccctttaccaatatcggaacgccgttgatacagaaacgtccatccttgatttccgaggtacggaaaccaacttcacatccggtcagttcagtgactttaccttggtcgtctttcagttcgagcacgagtgtataaaggtggggatgttccgcatcccaggctttcacattcggaatcttcttttcatcaaatgctatgaaattacttaatccgcgggatttaatttgaatagcgtcctgcaagacagctttacccgaatcatctttcaatgtatacgcaatagaaccggtagtagaagaaggtccttccacagttacttccagtccgaagataccgtctttgtatctatctttatccaaagaagcattcaatttatagtcggcaatgtactgtttgggagtactgtacaagtaaacatcacgttcgataccactcaaacgccacatatcctggcattcgagataagcacccgcactccaacggtatacctccaaagccactacattctctccatcgttcaagacatccgtgatatcccattcggcattcgttttcgagccttggttatatccgagcagtttcccgttcacccatacgtaatagaaagagataacaccttcacagcaaagtactacccgacgtcctttccagttggcaggcactttaaatgtgcggcggtatgagccgacttcattttctgcataagggaccaacggcggattcttcttaaagttgaacattttgtcgtcaaactcatacgtttcgttgacgtagatagctgtaccatacccttgacgttcccaattgccgggaacattgatgtccgcccaacctccggtataataagaaggctgataaaagtccttcggacggttatcgggattcttcacccaatggaatttccattttccgttcagggtcatataaaaaggagactgttcgtatccgcccggtttttcaatatcggaagcattggcgtaaggccatacataggtatgaggagcgagtttattcagtcctaccgcatactggctctgccattcgggcaacggttgttcctgcgccgaagcgaaggtagcagtcagtcctgccaataagattaaaaaggttcgtttctttaagctaatgttcataattattatttttaacgactagactcttattctatcattacttcatcaaaatagattcttgcttcctgatcgggacggacatgatctttagggcatattcctgctcctttcgccgtcacacgtacataacgggcagatacgccacccatatccagcgagtaatcatttctaaaagttccttccttataaatttcttccaaagaaaagttcaactcccctatggcacagtatgtccggttatcatcggaaacttccacacgaatcattttcggtttatgcactcccattccataattcgtaatgcaaccaatggcaaatttattcaatttttccttaccaagcaaatctatggtgaaagaaattgaatcattccggctccagttacaccattcgaaatcagtatatttcaggcttccccgcaatccgttgactaataacatttcatttttcttattaccaagcaatggttttgccgtggctttgttccatgtaagctgcaagtccaggatttctcccgtttgcttgccgtccataaaggtggcggctttcaccatttgcgtttttgtcacacggataggtccgtcatagcgatgtgaggacatcgccgggttactgccattcagcgtatagcgaatttccacatccggacggagacattccagattcacctccagatgtccgttcaccggcgtcactgtttgctggatattatacatcgaacgggcataaacaatccctttttccgccaaatgtgcattatatatatccatccgtttcaagaaaccggaccaatcttttgtgcccgtgggcgtccatgctacttctgccagagcagccagacgaggaaacaagagataatccacgtcttccggcttattacaaaattctgtccacatacaagcttgtatgcccattaataaagattcatattccggtttccaatccttctgcacaggctcgtagtcaaaaacatctttcagtgtattgtttccgaaatatgttaccggttcaaaccattgaggtccctgataacggatcagatacatgatgcgtgccggagtcataataaatcgatgtcccttttcagcagctttcagggcagccgttcccattccctgccaaccaagtataatagactcttcgggaagaaaagaactgtttgtcaactcgtcccaaccaatcacttcacgtccttttttacgcagataatcactgatacgcttcataaagtagccctgtaaatcttcttcattagtcaaatgctgctttttcatccgcttctgacaaagcgggcatttttcccagttcgtctttcgtgcctcatctcccccaacatgaatatagcgggaagggaaaagtgtcagaatttcatcgaaaatatcttgcagaaaggtaaatacactatcgtttcccgcacaataaataatctctgagttccgtcctcccaatccgggaagtacaccgataaagtctttcacgaccggacaggcaagttgaggatatgcagcaagcgccgcattactatgtgccggtacatctatctcgggaataacttcaatctgcctgtcagcggcataagccactatttccctgatatcttcctgtgtgtagaaaccgcctatcggtgttggttctccccatttcgggttacggcgtgagtggaaaggcacatccgtacggtctaccctccatgcaccgacttccgttaaacgaggatatttcttgatttcaatccgccaaccgttatcatctgtcagatgaaaatgaagtttattgattttcagcatcgccatacagtcgataatccgcagtacattttctttaggaataaaacaacgtaccggatccaacagtaatccccggaaaccaaaacgaggttcatcctgaattgtcactgccggaacactccacacgacattctttaccggttgtcccgattctatggcagcaggcagaagttggcggatagattgtaatgcataaaaaaagccctttgtatccgaagctttaataagtatctgttccggcgtaacctttaacagatacgcttcagtttttaaagaagaatctgtcacgaaaatgacttgcccctccttgctcccgacatttaacatgggggttatcccggcagcatggacaaacaaatcgataaagttgtgagcaattgtggcctgttcctgattttctactgcaaatgtagtttttgcagaaaagataaagctaccactacccggcgtaatttgtgccgggcgtggaactattgaattaaaaggggatgttaagttatcagcctgcaaaaacaccggcaatggcgaaagcagaatgagaatgattaagatatattttttcatgatgtatgtacattggatttattccttgtcacgttccggtgagaaacggacaggatcattgtattgctcctgaagtttcagcatttcttctttcaactccttcaccaccggttcgtattctggttgtccgtagagattgtgcatttccgacggatctgcttgcaggtcatatagttcccaccagttgatatcattatagaaatgaatcagtttatagcggtctgtgcgtacaccgtaatgacgtttcaccatgtgttcagcaggatattcatagaaatgatagtaaagagctttccgccagtctttcggatgttcacctttcaacaaaggcacaagagatacaccttgaatatcggaaggtatctctgctcccgccagttcgaggaaagtaggtgcatagtcaatgttttgaaccatttcggtgatgtcacctctgcggtcgaatcctttcggcagacgcatgacaagcggtgtacgcatagattcttcgtacatgaaacgtttgtcaaaccaaccgtgttcgcccatatagaatccctgatcggaagtgtagactacaagtgtgttatccagtaaacctttctctttcaagtaatcgagtacgcgaccaacattgtcatccagtgattttacagtcttcatgtaatcacgcatataacgctggaatttccaattagcaagttccttaccctgaagattctgtttatagaaatcatctataatcggagtgtaaaacctgtcccatgcggcacgttgcgcttcatccatacgaccgatatatttctcatacaaggatttcaaacgggattttttatcaggacggagcattttgaggtcataaatcatgtccatatcctttacaatgctcatttcttgtgcagcggcagcgggacgaccttcgtaatcgtcaaagaaattatccggtaacgggaaggttttatcttcatacaaagccaaattacaagtatctgccagccagttacggtgaattgccttatgatgtatcaaaagacagaaaggtttctccggattgcgtttattctctatccagtcgatagcatcatcagtaataaggttcgtaagatacccatgtttttgaattgtgtcattattttgcgtaatgaaatccggattgtagtagtcaccttgtccggggactatctgccagtaatcaaagccggagggcaggctttcaagatgccatttacccaccaatgctgtctgatagccgattctctgcaacagcttcgggaaagtctgttgcgaactgtcaaatacgcaagtggtattatcatagaatttattggcgcaactatgctttcctgttatcatacaggcgcgactgggaccacttaaagaattggcaacaaagctttgggtaaaacgtacaccgtcggcagcaatgcggtcaagattcggtgtttccatgtagcgtgtgtcgtaacagctcatcatttgtgccgtgtgatcgtctgtcattatgtagacgatattcagtggtttctgctccgcaggcttttgtttgattgaacaagaaacaagggaagttacggcggtaacgccagtcaaagagtaaaatagtccggattgtagatttttcatatataataaattaagtaaacgaagaattcatcatcggcaaaaataagttttttgattaataatcgacttccatttatcgccattttatttccataaatgttcaaaaggactgattataaccctaaattccggatgccaggacaaatatcccccgcatccggaaatttatcaggtcatttaaggggtttaagcttctgcttaattcgtatagccaaaattattgtctgaagtagtaagggccggattggcgtcaatctcgctactaggaattggcaataacaaattctttttcaaaaattcatccgtcaatcctcttgtaccattataaatacgatctaaccaagcattagaactagcaggatacaatgcgtcagatgctatcgttatttcatgattattatgtaactccaaagccatcttaaaatactttgtcccacgaatacgaggcatttcatacattccgggctcaccgcaaagttctatgatacgctcaaaaaacaatttctgtcttacttcttcctgattcaaggatgtcggccagtcagccggctgagcagaaactttcatacccgaattacgtgcacgatttagaacttcttttgctaatgatatggctttaggagtgtcccccaattcattgtacacatctgccatcaacaataacatttcagcataacggtaaaccattaagtttttatggctcgctgtacctacctgattctgatcatataacttctgaaaacatggccaagcattttgagatccggtttttacaaaaacttcttttaaacatttggtgatagctacattttccaatgtaacgccatgcgttgaagcataattttcaatagtctcaatagtagggttcttgggatcaatgaatgctttataaggcaactttcctacatatttctttttttctttggtagcaacaccattcttcatcacatactcgtcaatatcaccatttacatatgcaaaataaggatacaagtaagtagagtcattaggtgaaagtacatctcccacagtcggctttggattagcctggttgttaccgctacggtttctccagcgagtcaaaaatgtctcattaattcgaggatctcccggataagtaccttcatgtaaatcataagcagctttagacgctttataagttccccaagaaattcccgtagtagcctgcggaggagcaaaacgattacttgcacgattaaagcaaacggtagaagaagttgtaaaattcaactgaaaaatagcctcctttgatccggtcacataatcaccaaacaaatctccgaatttaggttcaagatcgaaaatatgagcttcataaacatcgtcaaacatattcttggcattcgtccaatttgcagtttcgtcaatacccagacacgccattttataataaaccttacctaaaaaagcttttgcagcccatgaattcgcacgcccgtctacaatcttactatcaatagccatagcatctttcatatcctgaactaccaaagccagaacctcagcttgaggagaacgaggtacagaaataccatccgatgaagaggcagccgtttttaatggcacatcaccaaacaaagaaaccaaattataataagctaatcctctcaagaatttagcctcccctcccatttgtaccttatctgtatcgctcaaactgcttttgtccagactttccaaaaaagcatttacttcagtcaccactttatacatcccattccaggctataggaatcaagtcatcactaggtacagcctccaatgaaattgccgtagaagcagtacgctgtccgaaagcaaatccggaagctatgataggcagttcctgccacatttgtccatacgcccctgttgtcgtcatatatccataacatcccagcagagccaattcggcattactccttgatgaaaaaacaactgcattattctgagaatagaccggatcttcatccaaccaagaggtacaggctgagaaacagccaactgacgccaataataaaatataatatttaaatcttttcatgtcttcgtgattttagaaattagaatgttaaatttaagccaaaaacaaatgaacgaggagtcggatatgagttcatatcaacacccggacgtaaaccgtcaaaagcaaaactatttacttcaggatcataaccactataatctgttatcacaaacgcattttttacagaagcataaacagatgtattctttataccaatcttattcgtccatttggcaggaagtacataactcagtgtaatatcagaacaacgtaaataactgccatcttccacataacgatccatcaccatattttgtacgacaaatgttgatttcggatataaattacttggattctcatccgtccacatattttggaacgctttacgcgtcacattattcgatttagttcccggagtgttattgtaacgattacctacatttaaaatatccctaccctgtaccccattaaaggatgcagacaacgacaaggatttccaagatactttagtctgaaaaccataagtaaaatcaggattcgggttaccaataatatcgcgatcattgtcatccactacaccatctccatttctatccacatacttcacgtcaccggctaccggagtcgttttattcaccgtttggtaatatcccacacttccatcttgtttaatgtacttaattccattttctgttatatcttccttttggacaatcccttgagtcacataaccataaaataatcccggagcttcacctgccaagaaaatatgccctacaccaaaatgatcccctaaactattaccataatacccaactctctcacccaagcatccaaaatcagcaggcaacaaacctaaatctgaaatttcattcctattgacacctatattaccacttacagaccatttccaagatgaactgtcaatgacttgtgcattcaaagaaaattcaacacctttattattcaatgaaccttgattgtaataagtagaactaaatccagctgatcccggcaaattccttgaaataagcaaatctgttgttttcttctgatagatatccaaggtaccactcaaatgggaattaaacaaaccaaagtccaatccgacattccatgaagatgttttttcccatttcaaactactgtttgacaagttggtcaccaccattgcagtcgttttatttcctgttccatccgcatatgaaatttcaccagatccttgtccatacatcgaaaaagtagtataaggatcaatactttgatttccggttgcaccatagctgaaacgcaacttcaattgattcagccatgaaacatctttcaaaaattcttcttgttccatacgccaagctatggatgcagaagggaaatatccccaacgattatttttcgcaaacttactggaaccatcggcacgcaaagaagctgtaatcaaatatttatcaagcaaactaacattaactcgtcccaaataagaaagtaactgataatctttttgtataggttgcgacgtaattacatcacctgccatatgcattccattctcacgaaactcaaacatcgtaaagttctttccaatcacatttttatttagaaaattataatcatcataagtcataccgactgttgcagccaatgtacctacactaccaagtttcgtattatagttcactatattttctactgaataattactttttgaaagattagaggttgccagataaccctgattattcattccttgatacaattgcattccataccatcgtttgcgatcattcgtattgatattaccacctgcacgaagactataagtgaaaaacttatttattttccaattcagattcaaactagctttaaaagttttgtcatctgtcaagtccacataatcattcagccagctgaacacattcgttttattttcatttgtaaaagacgggtcattctccggcaattcgaaaggagcataatcaagagcagtacgtgaaatagcaccagtagcaccgccaagagtattaccacctgccatcatattattctgtcgcaaggatccgcttaacgccatgtttaaatctacagatttggaaagctgtgcactcaaatttgcacgcaagtctccttgcttcaaaccggtctgcttcacagtaccattaatatctttaaaattagcggaaatataataagttgtcttacctgcaccaccatttactgataaagagtagttctgagaaaaagcagaagtatagatttctttctgccagttacgataatttactacattataagtttcaggatcagcaggatcatatttatcgtaagctccattaaatacatatctcacctcatctccaacaatatggaaaggcactttgccatccgtaattcttgaattatgataagcagcatattcctctaaattcatcatctccaacaacctgcttgcattagcaatagtaaaagtagccgaagcgttcactttagctttgccctccttaccttttttagtagttatcaatataacaccgttcgcaccacgagaaccgtaaatagcagtagaggatgcgtctttcaatatcgtaatatcctctatatcggcagggttcaatgatgacagcggatcttgagcaatctgaaagtctccgctaatacccgaagaagaaaattctccagttgaagcttgcggaatattatcaatgacataaagaggctgattatcacctcgcaacgaactagctccacgaatcgtaatggacgaagcagctcccggattggaagaagccgtgctcacgactagaccggcaacttttccttccaacagattatctatggaaacggcttttgcagcttcattcgcatctggtctcatcgtcgtcagtgctcctgtcaaatcacctttacgagctgttccataagcaactaccacgacttcatccaaactctgtgtatcatctttcatttgaatgttcagttttgtttggtttcccacagcaacttcctgcttcacatatccaataaaagtaaatactaatacagactttgtattaggtacggaaattgaaaaatcgccatcaatattagttattgttcctgaggtagtaccttttacttgtacattaacaccaggcataccctcattaagagcatccactaccctacctgtaatggtcttttgttgtcccattatttgccctgcaaaagcaaataacgtaatgaaacacattagaaaaactttcaataggttcttcatagaagtcatttttataagttattaaattaaagattaaaaagttttttctgaattccctttcgttgaaattcattgcaaatataaagatgtagtttaaagtgaagtgtttaaaaacagctatgttttttccaaatttgtctaaaaccacccatttcatcgattaataataatacaatagacatctttgaacattttttgaatcaaaaaaagaaataagaaaatagtggtctggtctacttttcagatgaaagaagagaacgactttctccttttttaatttgctgctttatttcatcagaaaaagccgtatgattgaacaaattacgtcctaaaagatctttttttctttgcctcccattaatttcaaccgagaatggttaatatctatcatgagaccagctctatcgtataattccaatcctacagataaatcattaaaaaatattatgtaacaatttatccgttatctcatttaccaaagtctgatgatatctattttccatacagcaagatttgcgtagtttacaatatagtttgttcaaccgggtaaatttacgcaaatcttttgtttcatgctaaaaacagagctgtttggccccgttaggcatcgctatgtagtgttccggtacaaaagccttcggccttagccagtgtttcaggcttaccgatatcaatgagtcgcaaatcttctaccagataaccggaaaactccacctgccggcaggtagcaagataaaaatccataatagagaatttgccttcccaacaaggaacatccaacaagcggaaaatagcaggtgaaagaacatgaataccactgaatgcatattcctgataacgtgattcatccggtcgaaagccttccggcttcacttgtcccgtgtctttattaatccagccgcaaagcctcctgtccgtatcaaaaagcagataacgtgaagttttacgccgactggccaacaaagtagccacactgccgttttgtaaatgatagtcgtataattcctttaggtccacatccgaaagaatatcgacattatgcactaaaaaaggctcatcggaatgttcaaagaaagtacaggctttcctgactcctcctcccgtatcaagcaactgttcacgctcgtcggaaatatgtatggtaagtccgaaattatcattagctttcagaaaatcgagtatctgttcaccgaaatggtgaatattaatcacaatttcggtgaaaccggatgctttcagtttcaggataacatgttccagcatcggacgtccggctatgggaacaagggctttcggcatagagtcggtcaacggtttcagtcggctgcccaaaccggcagcaaatatcatagctttcattagtcttctatatagttgcttcaaacgtacgttctatattctgttcacgatgcaccaattctacttttactccgaatttcttattaaggtgctccgccaaatgctgggcggaataaacagaacgatgttgccctccggtgcagccaaaacaaacagataaattactaaatccccgttccatatatcgtttcacagaagcatccaccaaggcataaacatgatcgagaaaacgaagaatctctccgtcttcttcgaggaaggtaatcaccggttcatccagtccggtaaaaggtttgtaacgttcatattttccgggattatttacagcgcggcaatcaaaaacatagccgcccccattgcctgtcggatcgtcaggaatccctttcttataagcaaaactcatgactttgactgtgagctggcgctttttcagatcgtccgtaaattgtttcagcccggtcagttcacgcaatactttacagagatacggatattccggatattcctctttcaacagttcgcgcaggttcccgatagcataaggaacactctggataaaatggggcttcttttcgaagtagccacgaaagccataggctccaagcacttgcaaagtacggaaaagtacaaaatggcgaagctgactataaaaataaggttcgtcaattggttggtatttgcggagtgcttcaatatattcttgcagcagttcctgacggagactatcaggatattttgcttttgcctgccataaaaaagaagcaatgtcataatagaacggtcccttacgtccgccctgaaaatcaataaaccatggttcgccgtctttaatcatcacattacgactttggaagtcacgatacataaaagtggcagaagaactacgaagcagaacatcgctcatcttctggaaatcatcttccagtttatcctcttgaaactccatgccggtagccttgagaaaacagtatttaaagtaattcaggtcccaaaggatagaacgttggttaaactccggctggggatagcaacgggagaaatcaaatccgtccgccccggcaaactggatagcgggcagcaggcgaatcgtctttcgaagcagttctttttcatcttcggaaaagacactcgtggcacgtcctttctctatggcatgaaacaacaaagtgtctcctaaatcttcttgcagataataggttttatcttccgacacgatgtgaatctcaggaataggcaaaccgcatctgcggaaatgggccgccatataaagaaaagcctcattctcatcgatacaggttccataaactccgatcaatgtttgcacccccgccaaccggaaataacggcgattggagccggaagaaggtaattctgttatattctcggcgggaactcccgtatatgccagataaagtttttgtagttcttcggtaatcataatcgtatattttcgagcaaagatagggataaaaactaaaaaataagagagctgatttaagtaatattcatccgaatacattatctttgtttcagttaaactgacctgatttcatgagaaaaaacatattggtactactatgcgtagcatttatcatacagtttaccggccttctcccccttcaagccggacattattactataaacaaatctccctgaaagacggactaccttccaccgtgcgctgtatcctgacggatgaacaaggctttgtatggattggaacccgttccgggctgggacgatacgacgggcatgaactcaaaaaatatgttcatcaggccgatgatcctcattccattccacataattttatctatcagatgatagaagacgaacaaaacaatatctggattctgacggacaaaggagtggcgcgctatcgacggcagagtgatgacttcttcataccaacgaatgagtcgggaaataacattatcgtttattcagtttgcctgacaaaaggaggcgtcttgttcggttcaaaaaataaaatctttttctataattatcaggatgcttccttacgcctcttgcaatcatttgagcgggaaccgaattacaatgtcaccctgctgaccctttgggatgaacataccctgctctgttgtagccggtggcagggcttactactactcgacttaaaaaccggaaaatataaccctccccctttcgattgcggaaaagaaatcatgaatatattcatcgattcacagaaaaggatatgggtggcaccttacaacggaggcttgaattgcctgacccgcgacggaaaactgctagccacctataccacccgcaattcttatctgagcaacaatgttgtattaagcctcgccgaacgggaagggcagatatggattggaacagacggaggaggcatcaatatccttgacccggaaacggggcaattttccctattggaacacatccccggaagagataactattcacttcctgccaattcgatcttatgtctttataacgaccggaataataatatgtgggcaggcagcatccgaaacggattaatcagcatccgggaagtttctatgaaaacatataaagatgtattgcccggcaacgaccgcggattaagcaactccactgttttgagcctttttcaggaatccgaaaaccggatctggataggtacggacggaggaggcataaacagctttaacccgtttacggagaaattcgcccattacccttcgacttgggaagacaaagtagcctctatctgtccgtttactcccggtaaattattaatttcccttttctcgcagggagtattcattttcaatccggcaacaggagaaaaacatcccttcaccattgtcgataatgaaacgaacacccgtctctgtaaccggggaaaagccgtgaatttactacaaaacacgcctcacagcatattattcctgggagatcatgtttataaatacaatctgaaagaacagactttcaatattgctaccgagcaggaagggcaagatatcatcggtacccttttacctattggcaattatcaggattatacttatataaacgatacaaaacacatctacgaactggataaccgtacaaaccggttgaaagcattgtactcttgccggaaagatactgttatcaactccgtttcacgagataaagaaggacacttctggatcgggagcaattacggattgatacattatcatcccggaaccaagacaaagactctgataccgacttccctgttcggcgaaattactctgctcgtatgcgaccagcagggaaaagtatggataggagccgacagtatgctctttgcctggttgatcaaagaaaagaagtttgtcctattcggagagtcggatggagctattttaaacgaatatctttccaagcctcaattattaagtatgcagggagatatctacatgggcggtgtaaaaggcttgcttcatatcaacagcaagctcccgctgaccacctccgaacttccacaactccaattgtcaaatgtcattatcaacggagaatccgtcaacgataagttaagcggtaatccgaaaggtatctccgctccttggaacagcaatattactatccgaatcatgtcgaaagaggaagacattttccgccaaaaagtatataaataccagatagaagggttgaatgaccaacaaatcgaatcctacaaccctgaactggctatacgctcactgccaccgggcagttataaaatcatggcttcctgtacggccaaagatggtagttggattcctaaccaagaagtactggagttaacgattcttcctccctggtatcgtacatggtggttcatcctcagttgcgcagttttcgttgtcgccgttattatagagactttccgaagaaccttgaaacgcaaagaggaaaagctcaaatgggctatgaaagagcacgagcaacaagtgtatgaagaaaaagtacgcttccttatcaatatcagccacgagcttcgtacaccgttgacactgatacacgctccacttagcagaatattgaaatcactctcctccgaagatcatcaataccttcccctgaaagctatttacagacagtcacaacgtatgaagaacctgattaacatggtgcttgatgtgcgtaaaatggaagtcggagaaagtaaaatgcagatacagcctcatccgctcaataaatggattgaggacgtatcacaagactttatcagtgaaggtgaagccaagaatgtgcgaatccgttatgagctcgacccacggattgaaactgtcagtttcgataaggacaagtgcgagactattttaagcaacctgcttatcaacgcgctcaaacatagtcctgaaaatacagaaattacaattacctccgaattactttcagaagaaagcagaatacgtatttccataatcgaccaaggaaacggattgcagcaagtagacacccggaaactctttacccgtttctatcaagggacaggagaacaaagcggaacgggaatcggattatcttattccaagattctggttgagctgcatggtggttctatcggtgcccgcaacaatcaggaagcaggtgcaactttcttctttgaactgccactgaagcaaaagaccgaagaaattatctgccagcctaaggcatatctgaacgaactgataggcgacaatgacaatgaacagattcctgatgaggacaatttcgacacgaccccttacagtattctggtagtggacgacaattccgacctgacggacttcctgaaaaaatcattaggagaatatttcaagcggatcgtaattgctgcagacggtgtagaagcccttcaacttatcaagagccatactccggatatcatcgtcagtgatgtaatgatgccgcgaatgaacggatatgaattgtgtaaaaacatcaaagaggatattactatcagccacatccctatcatcctgctgacggcaagagatgataaacaaagccagctgagcggttacaaaaacggagcggacgcctatctcaccaagccttttgaaatagaaatgttaatggaactcatccgcaaccggttgaaaaaccgcgaacataccaagaaaaggtatctgaatgccggcttgattcctgccccggaagagagcacgttcagtcaggcggacgaaacattcttactcaaaatgaataagattatccaggaaaatctggataacagtaatctggatgtcgctctggtctgcaaagaaatcggcatgagccgggcttcgctctataacaagctaaaagctcttaccgatatgggggccaatgattatattaacaaattcagaatggagaaagcgatcacattaatgactggcacggaactgtcatttacggaaatcgccgagaaagtcgggtttactacttcccgctatttcagtacggctttcaaacaatatacaggcgaaacgccgacacagtataaggaaaagcggaaacaggaaaagaaaaacgaatagccatccgacaactaaaaaataaaaaacggtgaacactgtgcagcaacgaactgcctgatgttcaccgtttgttctatatattgagccttgtctactctcaaccgttgacttttttatagtcttccaggaattttttcagtcccgaatccgtcaacggatgattcaacaatcccttaatggcactcaacgggcaagtagcaacatccgcccccacttccacacattcgataatgtgcttcgtattacggatagaagctgccagcacttgcgtcttgtaatcatacgtgcggtacatacgtacaatatccccaacaagtcctatcccatcttcacaaatatcatccagacggccgacgaaaggagatacataagttgccccggctttagccgccagcaacgcctgtcccaccgaaaagaccagcgtacagttcgtgcgtattcctttctccgtgaaatacttgatggctttgataccgtcggcaatacaaggcactttcactacgatatgcggattaagcgccgccagctcctcgccttcgcgaatcatcccttcataatcggtcgctatcacctcggcactcacatcaccgttgacgatattacatatcttgacataatggtcacgctggttctgtgttcccttgataccttctttcgccatgagcgaagggttggtagtcactccgtcaagtacaccgaggtcatgtgcctccttaatctgctccaaattggctgtgtcaataaaaaacttcatactcttatttttttaatggttaactatctaatagtcaaagataagaaattatttccattcacaaccgtatcaagcgatcgttattgacggatcaagataaacatcctggatagcattcaataattctacccctttattcatcggtttctggaaagccttacgtccgctaatcagtcccatacctccggcacgcttattcactacggcagtaatgacggcatcacgcaaatcggaagttccgtgagattccccaccggaattaatcagtcctacacgccccatgtagccattagcaacctgataacggcaaaggtcaatcgggtggtcagtcgccagttcggtgtacatacgttcgtccatcttgccgaagccgatagctttaaagccaccgttattcgtcggaagtttctgcttcacaatatccgccttaatggtcacacccaggcggtcagcctgtccggtcaggtcggcagcagagtgataatctattgctccttttttgaaatcattgttacgcagatagcaccacagaatggttgccatacccagttcgtgcgcatattcaaacgcctcggcaatctctaccaactgacggcgactctgttccgaaccgaaatagatagtagctccgacagctactgcccccatgttccatgcctccttcacggtgccaaacaacacttggtcgaagctgttcggataagaaagcagttcattatgattcaacttcacaacgaaaggtatcttatgggcatacttacgcgctacggaacccaggattccgaaagtggaagccacggcgttgcagccgccttcaatagccagtttcacgatattctccgggtcgaaatagatcgggttcggagcaaaagaagccccggcggtatgctcgatatcctgatcgacaggaagaatggacacatatccggtatttgccaatcggccatgccccaagagagactgaaggctattcaatacctttatattacgatctgaatccaaccagattttatctattgtatcgggagagggaatgtgaatcagcgatttatcgatggttttacaggtgtgatccaaataataacaggatttatctcctaataattctataactttattcataacttcatttttttaatgtataactttattctattttttctttccctggttggctactgcctccattaaatttctgatttcttcgggattacccagaaagtagtcattagctacattaagattctcgtcgaactcaaacacataaggcacggcagtaggcaggttcagttttataatatcttcatccgaaatatgtttcagatgtttgataatccccctcaaactattaccgtgagctaccaccagtaaagtatgggcagttttcaatgcaggaaatatatttgattcccaataaggcataatacgttcaatggtatccttcaatgcttcggtacggggcagttcagcatcgggtacctcgtgatatcgatagtcgaaacgtggatttctaaggtcattctctgcaagcggattaggagcaatgtcatagctgcgccgccatacaagcacttgttcctccccatacttcccggcggtttccgctttattcagcccttgtaactctccataatgcttctcattcaggcgccagttcttttccacgggaatccagtcgagattcatcttatcaagcacgcagttcagagttttcactgcacgtttcagataggaagtataggctttatcgaaattgaagccatattctctcagcgtctcccctgccttctcggcttcggcaactcctttttccgtaaggtctacatccgtccagccggtgaaacgattttccttgttccatacactctctccgtgacgaagtaatactatttttttcattcttaatgatctcctttctttttatatctacgcattatatatagaacattttatttcttcacaaagttcacgaaagaataaggagttatcaatacctaaaaatggtggtttattagcaggaatccgacaaaaatgactacttttacatattaaacaaatttttaaccttcagaacaaactgtaaaatgcctgaaacagacacacacagagaagacatcttcctacggaaattaatgaataaagccaacatcggctggtgggaggcagatgtaaaaacagagtgttacaaatgctccggcttcatagcccaacttctcggtctcgacgaggagggtattattagtttcaatgatttcaacaagcggattctgagggaagaccagcaacacaccacttcccactctttcgatgaattacagcagacgattgaagaagtatatctgctcgatactcctaaagggggtgtatggatacgcagcaagatatgttaccaggaaacagacgaggcaggaaacaccaagatatatggcatagccgaaacacaagacggaccacatatggcgtccgcttaccaggcattgcagaacagtgaacgcattctgcataatatctataaaaatatccccgtaggcatcgaattatacaataaagacgggctcctgatcgaccttaacaagaaggaactggaaatgtttcatatagccagcaaagaagatgtcttgggagttaatctgttcgagaatcccctgcttccggaagagatcaaacagaaactcagaaataatgaagacgccgactttacattctgctatgaattttccaagataaacggatactaccagtcacaaagttcgggaggcagcatagatttaacaaccaaagtaactacgctgtacgaccataatcatgagccgatcaattacttggtgattaacgtagacaagaccgaaaataccattgcttataataagattcaggagttcaaaaatttcttcgacctggtaggcgactatgccaaagttggttatgcccatttcgacgctttgagccgggacggttatgccctaagcagctggtacaggaatataggagaggaagaaggtaccccactaccggaaatcatcggcatacactcccacttccaccccgaagaccgggctgtaatgcttgattttctggataaggtcattaaaggggaaagtagtaaattatgtcgtgatatgcgtattcgcagagctgacggaaactatacgtggacacgcgtgaatgtgttggtccggaattatctcccacaggataatatcatcgaaatgttgtgcatcaactttgatatcacccaactgaaagaaacggaacgaatgctcattcaagctaaagagaaagcagaagaatccgaccggctaaagtctgccttccttgccaatatgagccacgagatacgtacaccgctcaatgcgattgtcggtttttcgagtatgctgcaagaggcggacaatccggaagagaaactgcagtatgtcaccatcatcgaagagaacaacaaacgcctgctacaacttatttccgatattctcgacttgtcaaaaatcgaagctggaacttttgactttaccttcgagaaagtgaatgccaaacggttatgcaatgaattataccaagcaatgcagatgcgaacctccccgcaggtggaactccgcctgtctcccgatctgcccgatttgcaactcaccagcgataaaagtaggctttaccaagtattatcaaacttcgtagtcaatgcgttaaaatttacctccgaagggagtataaccatcagttaccaaataaaaggaaaagaagcgaaattctccgtagaggatacgggtataggaatcgaaccggaaaagcaaacggctgtattcaaccgttttgtcaaactcaataattttattcccggcaccggtctcggtctttctatctgccagagtatcatcacacaactcggaggaaagatcggagtagactcggaacccggaaagggttcctgtttctggtttacacatccactcggctaacccggaaagcaggttcacaatttacttccagaaccccgttacaatacattcagggcaaggattattctcaccatgacgagaaaaaattctcatagtaatgagaaaaagttctcactgtgatgagatttttttctcatcacagtgagaatggtttgagaaaaaccttagtcaataacttatataaatgaatagaataatcaattcataaaagaagattagaaaccaaacttgaacggtgtgccatctaatttcttttcaggaaaatgcggtctgttatcgtacccggaagctccgattcataatgtgtcaccataatcatcgttttatctttacgttggcagaaggcttcaatcaccttcttcacccggcgacggttgtaagtatcaagtccgtgaagcggttcatccaaaatcaacagttccggatctttgacgaaagcacgtgccagcagagccagccgttgctcgccactggaaagttgcaggaatgctttatctttcaatgctgcgataccgaatacatccatccaccattcacaaatatccatctgctccggttgcggccgtctgtacaacccgatactatcatgtaaaccgcttgctacaatctcaatagccggcaggtttttaaggtaagcacgatgcatctccggactgacgtagccaatgtgtttcttaatttcccagatactctccccggttcctctttttcgtccgaacaggctgatatcacaggcatacgattggggattatccgcacaaacaagactcaacaaggttgatttacctgcaccgttttctccactcaatgcccatttctccccacgatgcacagtccaatcgagttctttcagaatagtacggtcaccatagcggatactgactttgtttagttttaccacttcatcggcatcgtaattattgccgttgtaaggcaaatcaataatacgttgttgtaaatcgtcaaaaggaacgaccgtatctcttgaacggaaagcatccaaatagacttcacattccattttcggaaagacttccattttgtcaacgggaatgacatgggtaatgaaggaaggaatatcatccaacatggaaagcaccagaattatctgtaccgacgacatcttcgtcagacgatcgagcaaagagaaaagcaattcgcgtgtaggagcatccagtccgataaacgggttatccataatcagaacacggggagcagtcagcagggtctttgtgagctggaatttgcgtaattccccactggaaagaaggataatcttcttatccagaagaggctcgatacggaaaaggtcgaataattcgtttttcagttgctcgtccttgatctcgcccagcatttcgcggacatcgggagcctcatcctggtcatgggcattccaacgttgctgatagtagtaattggcgtcggcaactccataggtatcacgaaaagcgatgtattttacattatcataaacggtctgagtagcagaaggagaaaaatcatattgcagcgctccttcacgcagcggatatttaccgatcagcgtatctacaaaaaggcttttaccactaccgttcggtcctacaatggctatatgttcgtctgccccgatagttgccgtgacgggtttggctaaacgcacaagcgggttgcgtgctacgccccccgccatgctgaatgtattttggctcatattcttctatttttatctatttatacataatcagtgcagactggccgggaacaattacttccggtccggtttgcgtcccaagtccgcgaacatctatcacaccgtccttacatactaccgtatatttcccggcaggtacttccagacgtgcgggagtagtgcgggagttgaaagcaacgataatatcttcccaacggtcaccgttcgcatgctccttcaaaaggaacgcaatcagattgttcccctcgacaggcaggaattccaaatgtctccgaaccatttccgcgtctcccatacggaaggcgggatgagatttacgcaagtcaatcaaacgcttataataggtgaaaacatcctcattcgtagttttgcgccgccaatcaatagcgtttaccgcatccggactcttgtagctgttgtccactcctttcttatcacgcatcacttcctcgccagcataaataaaaggaataccttgtgaagtaaagaccaccgtttgcgccaatttatccagacggaccaactgttcgggagtaattcccggcatacttgcctttattcggtcaacaaggcataatccgtcatgacaggaaacataactaatcatctgtgtaggttgcttcgcccaaggttgccggctataattcaccgaatcacagcgcacttgcggatgttcaatcgcacccacaataccaaactttacactcgcctctcctcccggaacaccggcaagaaacgcacctttatctttttcccatacaggtccgcaaagcccatcacgcagttcatccgaaaagacagcgatatccggcatacgggcaacatttcctttcatggccaacgaatccgccggatattgaggagcttcagcagcccagccttctccataaatgcaaatggtaggatcaatcttgttgacagctttcctgatttcgttcatcgtctcgatgtcgtgtattcccatgaggtcaaagcggaagccgtcaatatgatattcattaatccagtaaaggacagattctatcataaatttacgcatcataggacgttcacttgcagtctcattgccgcatcccgagccatttgccagagaaccatcttctttccggcgataaaagtaaccgggagcggtacgttcaaagttactctctatcgtattgaacgtatggttgtacactacgtccattatcacccggatacctgcctgatgtagtgcctgtaccatttgtttgaactccttcacacgaaccgcaggctgataagggtcggtcgaataagaaccatccggcacgttataattcagcggatcatatccccagttatattgtttttcttccagcttcgtctcgtctacggaagcataatcataagaaggaagcagatgtacatgcgtgatccccagttctctcaaatggtcgatccctgtcagacatttatcagcattcatggttcctcgttcggtcaaggcaagatattttcctttgttcttcacccccgaagtagaatccgacgagaaatcacgatgatgcatttcgtagataatcatatcggcagcagatttcagggtagggcgccggtcactctcccacccttccggctgggtcgatttccagtcaataatagcagcacgcttgccatttactccgacagcacgagcgttaatacccggtgtatctccttgccatttatcatcaatcttcacattgaaggtgtagaatttacccagcaaatctttgtctacggtcaccgtccatgttccgtcttcagcaggttccattttctccgtttcgtaagcatgaccaccttcccctgcatcataaagcatcagccgtacctcatcagccgtaggcgcccaaagcgtaaacctggtagcccccggagcatactccatttcgacaagattccccgaacgaacgggatagagttcataagaagcgtattccttttttgcagaagaacaactcatcactgttgtcatcgtagttactcccagtattgctaaataattagttcccatcttcatcttaaccctttcctttgatatatagtgctttatcgcacctataaacttatagcatagaacttatatcctcaattatttcaccttatccgggttctttgctatgtaatctttccaactattatatcctttttccaatgccggccgtcccatttgcagaaaatggcaatatgcggccgccaaaccgtctgtcgcatccatgaaagtaggcatatcttctttcgaaaagcgaagcattcgctgcaacatatccgccacttgctctttcgaggcctgtccgtttccggtaatagccattttaattttcaaaggagcatactcggtgattggtatgtcacggcttagggccactgccattgctactccctgcgcacgccccaacttcaacatcgactgcacgtttttgccgaagaatggtgcttcaatagccagttcgtcaggcagatagctttcaatgatactcaatacacgctcatggatatggcgtagtttcagatagtgattggcaaatttacgcaagtcgataatccccattgcaaccatttcgggcttggttccttttattctcaagatcccatatcccatgatcgtagtaccggggtcaatacccaggattatcttttcttttaccggttgaatcactctatcacctccattaatgtcggaaaaccaatcaccttatccttaaatatttttgtaagttcatcattcaggcgcactccctgttccagatgccagcggtgcagcaacccactactctctacctcccactgcaaggagtaagcacttccttcctcccggtggctcaatatccggcagatacgcggcgtcttcaatgcaccatgcttctgtacttcgggaatataggattctttaatccaaatcagaaaattatcgtgaacgtcgtcatccacctgaaaagtcgtattataaatcagcatttctttattttaaactattatttaccgcaaacatagcaattatttcagaatattgcattatatttgcgccaacaaaaaagattcgtttacaaacgttatcatataaaattaaagaaggggcgttagctcatctggctagagcgtaacactggcagtgttaaggtgatcggttcgagtccgatacgctccacttacaaaagatttaaagctctgattttcagagctttttctttttcactaatggctttactccccactcagaaagcactatacttatattactttaactctattcatcccccatttcctaacaaattaaactaaaattccttttttcgttctcatcatctctatttcgaacagcaataaaaaagggaatgcacagtaaactgtatgtcccctcaatcaataacttattcaagatttactctataacttttctatttcctctttagacaatcccgtagcttgtgaaattatatcaatagctactcccagtttttttcagattacgagcattatcccaattagcctcttcacgcccttccgcccttccttcttctcgttcggtatagatattatcatgcagaattactatattatccaagtgacgataataagccaccaattcatccttagtcatgctatccaacttcaatctctcccgtgcctcttcaagctctagaactgtagcactagaaggaatctcacctgtattcaaatagtaaatccattcttccaacggactcttggctatctgattaaagccatttacctttaagatatagtattcaggatacaactgactaactgtatccaccttgaatgtttgcttttgaaatggagtcagttctaaaatatccccttgataaatacccctgaattctgtctttccatgatatacgaagtccgtcccatgacctaatgagaaatagacgatattaatactatatactttacgtaccttgtcataactctctcctctatttatatacttttagaagtaccgaacaacatacgctggaagtaagcatattcattattatcctgtacctcgatcaagacaagctcatccttagaattctcggcaagcatatctacttgtcaaacttatcctcctgattactttcactttcaaggagtttctgaataacaatcttctcacccggcaacgtagtaagcaaaccttcaagtacactaaagtttgccttattccggagcagacgtttcatcgcccagtcaaaacgaattatctgattattattactattattcatattcaatatattgattaacacaaaggcaaacaaaatgccttggaattccaaagagtaaagtactttttagaatataaagcccctcaaatacttaagaatataaatatcgatcgaattaataattctatttagaagtccatgctaaaattacacgtctactgtgtagatacaatattatacaacatacaattctctttgctcactcatttgccataattcttctggaatatttttacgcatttttttgaactgaaatatagaggatgtaaattaaactgtgtcagcaaaattaatattttattttttgctgacacagtttaatttacatcctcatataatcatattcttgtcattcacatcctgtccggattccacttttaaccgccttcctgtcgcttctttaatgtatccggcaaggaattgtgtgttcctttctaaaagaatattatcttcaagataaagaatgcgggtatctttttcaataacaaaaggattcccagctaccattactatttcatgtgatagaggaattacattcctataatcctccaccctttctaaagtattgtacgcagctataacaacggatattacacttattgcaatcagtttctttatactgtttctgcttagtcaatattaggagtatcccaaattttgtctttttcacagtctatatacagtatctcactaccacatttcatgcggaaacgtccttgctccaaccgccattttctatcctgaccgacaaaagccaggtcgcttcccttcaacttcataacaaccttctttgtttcacccgattgtaattcaactttctcaaaattacgaagacggatcacatctggtgaaacactagctgccaaatcactagaatacaacaggaccgtttccttacctgctctttctcccacgttctttacatccacttcaaatatcagttcatcatccgcattgaaagtcgtacgattcactttaaaattactatactcataggacgtataacttaatccatatccaaagggccattgaacatccatgaccgcatcataattatactccccttccataggtcccatctgttcacacggcttataatcatacgtagcaagcgaattgatgaatttcggatatgtaaaaggcaatttaccgctgaagttcacatctccagcaatcaagtcagccaatgcatctcctccgtaatttcccggcaacataatatgaaccaccgcttttgccaaaggttctatctcatgaataatacgcggccgtccttcgttcagaaccaatattaccggctttcctgttgtcgcaagccttctcactaactctttctgattggaagaaagattcaagtcattcagatttcccggagtctcacaatacgtattctctcctatacaagctattatcacatccgccctaccggcagcagcaactgcctttccaatctctggacaattttctttccaccagttatcattaggatcagcaacatacgtcactcccggttcatagataatgttttccgtaccaaacttgttgcataatgcttcatagatagtattataagcctgcgcaaattcatccgccaactctccctgccaactgtaagaccatcctccgttgagacaacgcatagcattggcgttcggacctgccaacaatatcttcgttcccttacgtaaaggcaaaagttctccttcgtttttcaacaagacctacgactccctggcagcctgcaatgccacttctgcaaactcccgacttccaaacttgtcatatttccgaatatcccagtaaggattctcaaacaatcccaaacggaatttcaaacgtagcacacgccgcacggcatcgtcaatacgtttcattgatacagccccttcctcaaccaattccttcaagtcgatacaaaactgttgttcttccgaaggaatcattgccatatcaatacccgcatttacagccagtctgacagcatctttcttgctgcttgcaatatgatcgcgaaaatacagattatcaatatcattccaatcggtcacaatcattccatcccagttcaagtcctccttcaaccagcctgtcagtagctctttattggcatgaaacgccaccccgttattattggcggaattgaccatcaatgacaacgcacccgcacggatcgccgccttgaaaggagcaaagtgcttctcacgcaagtcaatatcggtaatagaagaaggggtacggtctttaccggatacaggaaccccatatcccataaaatgcttgatacaggaagaaatatgatattcatccactttattcagattatccccctgcaaaccacgtacagcctgcacagccatttgcgcattcacataggcatcttccccgaaactctcccacatacgcggccaacgaggatcgcgcccgagatccattacaggagcaaacgtccatggtacacaacaagcgcgagtctcgtaagccgtaatctccgcacaatgcctagttagttccctattaaaagcagccgccatattgatgccttgaggaaaataagtagcgtcttgtgtatatgaagccccgtgaatctgatccaaaccataaatacatggaatcccaatttcttccaaagatttcttttgaatctgtgtgatcacttctgcgaatacttcctttttttggctgactccgaagggaatattcagtaacgaacctaccttatatttaccaatcaccgtatccagtaacgcttcactcaatttattatcgtttttatctgtcactgccccaatggtcagttcacacatttggccaatcttctcttcaagggtcatgcctttaagcagtttctctatttttccttctatttccggatctgatggaatggcaggaaccggttgtctttcagcacaagccgaaaaaaagcttccaaacaataaagttgttaatagttttttcatggtaatttgtatttatttaaattgtaaattctctatatatggattgacaaacagatattttctacaatcagccttctttatctgtcttccgttaaacatgacattatcaaataccacattccgcaaaggaaactcacgactcactctccgcacttgagcaggcagatatttgtcgtctgtaaaagttatattccgaaagacaactttggacaaacttcccgtatctttaccgtcacttactatctccacagcaattggtcgtccgccatacaagttctcaaattgtatattctcgaacggaatgtcagacatccgtccaccccaccgccaagttcctcgtatatgccaacacatgattaatagccgcacatcctcctctccaaccctcatccccttccttgctatcatacaatgtaggtgtctccaatacgatacagtttctataagtcacattctggatataatccggacgagattcacgaaacgttccgcactccacgggtcggccaaaaacacattggtgcaatccgtccaacccacacagttttccactaaaatatcctcacatcctataaaaatagtcagtggaagtagtacctccttttccaattccacaaaacggttgtaaaatacacattgaggaaacatacccttcaaatgcttgcagacatattccttataataatgcttgaagcatctgaaacctctagaatgaaacaggataagaataaccattatttccgtatcgctcatacggttcggcttattccggtgcttgcagttcttgttttcaaccatatattttttctgttgcaatgcaaattccttgcataaatcatctgccatacaataaatttccgtaactttaaattttgggaacatagcggtaatcgtttaaactctataattagacactataaatttaatacttttatcgctatatgtctattattcaatgaaatatttataaacttaggtagtcatatacaaaagaatatatttataattgttttgctcttaaatcttccgacttttttaattacatatctatataaaaactttatattataacaaaatatttcaacaataattaagctgtaagattgtacatagttaccaaataataaataaatacatagacatacattttgccaaaacgagagaaaagaatgtgtgtcataatacccaaattaaaaaatttaagactgtctaacaaggctcttctcaacgatttcacccccttctgaactgaactctgacagagatttcttttttcggcacttgttagacaacctcattttcattaacaagtatttttataaaacctcttaatataaaattctacatgagaaactatttggtcaccttgtaagttccacttacatactcctttgacttcatctctccgggaaggattacggtagcgataacgcccttaggaatggtaaattcccaaatccaggtgtccccctcatatttccaggcactcttgatgagtccggagacggaacggtattcggcagtcacgtgtcctaaccgcttgtccggaataggcttcataatgatatgcttgaagccaggggtggcgggatcggctgcgatgccggcaacggtttcccaaatccattcacatacgcatccgtaggcataatgattgaaactgttcatgccgcgtggtcccattcctttgtctatcatatagctgttccaccgctcccaaatggtggtggctccattgtccacagaatatagccagcttgggttcttacgttggaagaggagttcataggcaatgtcttccatgccattctccgtaagggtggccataaggatagatgtgcctagaaatccggtctgcaagcaaagatcgtgttgtgcgaagtttttgcgcaggcggtctatcatcttcgctttggcttcgccttccaaaagctggttcttcagggcgaacaaggcaggagtttgcatagtgttgagaatggcggttttgaaggtaccgtcctcattgaggaaattttctttgatgtatgcctttgccgaatcagacatttgctggtacttggcagcatcgcgacccgtggcggcagccatatcccgcatcatggaagcatctatcacccaataggaagcgctcaagtagttccagtagctgacggcatcaggaagcggaccttggggagagaaagccagtccgctacaactttccagcggttcgtagctcaaccagtcggcccattggtagttaccgttctccccgcagagggtctcgtggttatactttgtatcgttgatgtagttcataaacaaatccatagcgttccagttctcctcaatgatttgcgtgtcaccaaattgtttccataccgtccaaggcacaatgattccggcatcggcccaacccaaacgcattttctcatcgccgtattgtgccaagggagccactccgggaaatccacccaaactgttctgggtgtcgcgcatgtcacgcatccacttgtggaagaacttcatagtgttagcaaagaacgtaccggtttcggcaaacacttgtgtgtctgctgtccagcccaggcgctcgtcgcgttgcggacagtcggtgggtatagacagatagttggatagctgcccccaataagtattggagatgagcttgttcacaaggtcgttgcctgtagtgatagtgccggtttccagttcctttgcgatggaagtaacgggaatggacttcaacgacttgatggcaacattcccagtggaagttatggagacatagcggtaaccgaagaaggtgcagtgaggataataggccacatagttatctccgctagcaaaggtataatccagacggataccagtgtggggaatgcgcagattttcacggtggcaacttccttccggaccatccattccacgaatcttggcgccgttgccgtcattgagcaattccgcgggaaggcaggtcagcactgttccttcggcagctttgaatacgaaagaaggtacgctggcacaattttgtccgaagtccaccactaatgtctctcccggacttacggtcatctccgtacccgatgcgaactcacgggcgataatcaccttaccaaactcattctcctttgctccttctacattcttccaaacgtatgctttgacaggagcgagggcgagatctgtacgcagatagacttccgccccgtccgaaggcaggatatcaccggagaattcggtgttctcttcgggtgtggagagtttgtccacacattcgtaacccatcggttcgcgtgcatcgtactcttctccgtcaaagataccggcatgtttcaccggaccggcaattccagccttccagtttttaagatcagtaccgtaacgcttcttgtttccgtcagagaaagtcagttccagtacaccacggaaggcacatttcttacctatcatgccgtcatatcctccgggggttatgattttgtcaccccaccatcccggcgtcacctgtacggagagcatattctcggcgtttggcttggtacggatgatgtctgtaatatcataggtgaaagaacgtttagtcttggcatagtgtgtgaagcccggtttcaggaattccccgcctacgggtttcccattcacatataactcgtaaactcctagtccagcggtcatccacttggcggagacaattttctgttcgtttttcacggtggacacgaaccaactcgcgccatcggctgcgcgaccgttgttatgtcctttcactacaggggcatctactgcggaaatccatttggattcgttccaggctgatgcttccaatgcgtcagtacgttttccaaattcggttgcgtttatcagtccgctatttgagaaaagctcgagaatcattattgaaataagattcgcaaaacaatggagattcattttcatacttatatgtaattttagtattaaaagattaacttgcgaaaggcttgaccatgccttcaaggattctttcattagatagtccttcgccgaaagtatactgcatttacggttttcatggtcgtatacttttacattatataatattcagttctcccttttttcctcaccaaccgggtcccggatagtttttctcatccattcctccgacataaataccacgtgccttccataaatcccacatcggagacaaacgatacttaaagtttgtgtaatcttttgccgattgcttgctccaagccgtctcggcataagctgcaatacggggaaagatatggtcaaatgttttttccaatgttgaatcccattcactccagcaagaagcctcaaaaccaattatattctttactttagtagcatctactctttccggaatacaacttgttagataggcattctgtagccctgcattgaaataagcaaaatccgtgtgcgactgcacgactttaaagcctaatcttaacgaatgattcaagacatctaccgaacctgcccaatattgagagatagctccaggcatatctaccgccatcttagaggcaactcctacggggcctgccatgtcactccaacccatcatttttcgtcctttttcattcagatatttatttatctgattgaaataccaaatctgtaattcaaaattttccgtaatgcccagactatttttcaggctcctaatagactgcgagttagcccaatgatttccgtgtgcttcgtcaccaccaatatgaatatattcacccgggaacaaagccatcacctcatccagtacatcatgcataaattgtatagcgaaatcatccgagacatcaattatttcactaaacacccccattctgcattccacctctatctgttttttagtggttcccaactgaggataggaagcaattgctgcagagctatgcgtcagaatctctatttccggaacaatcgttatattcaatttcttggcataagccacgatctccttgatatcctcttgagtatagtgaccagactgaggaatattatcaaattgatcattttcccattcccaacccaaaccggagcatttacgtttagaaccgacttcaatcaatttaggatatttctttatttcaatacgccagccctgatcatccgtcagatgccaatgaaaggtgttcatcttcaagcgtgccatttcataaagaagcgtcttcacagcttctttccctttgaaataacgagcttcgtcaagcatcaccgaacgccatgaaaaaacaggatagtctgagatactaacttcacgtaccacaaataaattgccctgcaacgtaatcaattgccgaacagtttgtgatccgtaaaagatccccaaattatctttagccgttaacacgattttgttattggcaacttctatccgatatccgccttcggccttcaccgtcaacgccggatctattactaactgaatggtagcatctgtcttatccttactgaccaccggttccataccgtgatcttcttttaaataacctgccaacaaagtggcttcatcttctattgccgctgtgcaactgattgtaacatctttatctactgcaaatgctccacgtccataacttataaattgtggcaatggaatgactctaatatcttctagggaaactccatcgcctccactactttcacctgtaccgttatcactatctgaacatcctgcaaaaggtaaaagcaggaatgaaaagcaaagaaatatactcattttcttcatggttttaaatttttaaatttatctattttttttgctaatatggtatatgttccggcagataaagcacagccctgttctgagagaaccttaccattcacacgaacctctccatttaccgaatttggcagttgcagaatagcttgtgtattcttaggaaccgttatttccattttaaaatctttatccgacgattcaaaagaagaacgtatctcaccggctatagtaggtatggtgatagccgcctgatgcaaataggtatcatccggtgctatacgaaatgttttataagctgcatccaagggctctataccacagacataacgggcaatgacaatcagaggaccaccactccaggcatgatttacagttccgccaccgaaaccattgggaccgatatcccagccttcaaacaaggtggtatagaaaggatggttcaccataggagcaaaacgtttttgcatacgttccatagcatacttgccctcacccattacaaagagtgcttccataacatatttctccatgtacggactagcatagaattgcttcttaaacaagtcaatgatatacggatatttatcttgttcagcaataccggaaacaacagccagggcctgtacgcgatcgtccgtacaatcattatactctggatgcctgtacgcatatccgttccagcaacgattatacccctctttcaccttgttcatctgccgactgtaattattagcatcagttgtttctcccaaaagttgtgccatttgccgagcaccttttaaggccaagtaatgccaaccggcaaagataagccggatatcccgttgttctccccaatccccccaagtccaactgcctccacggaaatttgttaaccccgtgctatccaatgtccataactccaaatagcgtttcactcccggataaacctgcgctatcgtttcgcgatcaccggtattcatataataattccaaaagccataatatccgatactggctaacatctgtcccggcaattcactatcataattacccgccggaatcggtgaagaaagtgctccatcagaatgttgccaagcaatcaactccttgatgcccttactcatcaaagcataaacggaagatgaacaagtgtaaaagcactctcccattaaaatcacttcgtcaccccaccattgcgcacgttcacgttccggacaatcaaaatacgtatcgcgcatgttaacataaagggttcgcaaggccttcttccaaaaacgattcacaaaatcattatcacagctaaaacttccggtcatttctgtattatagcccgtttcacgatatttcaatccattaacttcgatacctttaggcagaataaaataaacctcatgtccattcagccagcctagtgattcataagattgccgacctcgacgagtaatatactcagctctcagattaatatctcccgctgcatatgtattatccgtataaatgccgatgcagtttccccctacagggtccgttatttccaatattggagtcatctgtaaattatagggtaacaaggcaatcagtgtatcctgttgttctcctttcaatctgcgcatagactcaaaagaacgtataccgaagtctttccattgcggaataggacgttttataagtttattgtaaggagcttctccccatgttcctaacaccagtgcgttactaaatcccagcgtttccggacattcagttgtctgccaccccgtcatatccttacgagcatcaaaacgaatgttcgattccggtaaacgaaaattaggataaggtgcatccgcactcccataagcaggatgaatccggcaaagccacgtttcatcactacccaaaacaaatttcctactttctaaattaaatagcaatccagcttgtccgctactcttgtgcgaaaagccctctttaccgaaataccagaccaatatagctatctgatttttccctttttgcaagaaaggggctaagtccacctcatcgtaataggtgtccttcggagtcggtccacgcttcactcctccttcaaaaacagcaagctgtccgttaatccaaagccaatacttactatccacggcaatctgtgcaaccgccttctccggacgttttggcaagataatgtctttccggaaagtcatccacgtattgggatgattggcatcggaaggggcgatccattttccttcagttgcttgtattcccaaaagtgaactcaaggaaaaagcaaaaatcagaactataaaaaatcggttcatcatataaaagtttatttgttttattgaatccccctccttcgtccttctgttaaaaaggggaaaagttcaaaggagaggcattcaaatatactcaatcagattctacttaccaacccggattttgctttagtcgaccgttgctcatatttatctgtttggtaggcaatggggctagataatcacgtcccggacggaacttacggttatcttcggttattacaaatccgtcactatccaaagatggactcaattcttcattctcgtctgcataattagagaactttacgcctttcaacggtagcggcatctctacttcagctgttttccaacgacgaaggtcatcataccggttggcttcaaaacagagttcaatcgtacgttcccgacggatctcctcacgcatatccaagccatactttgtaacaaactcattagttaaatccggcattcctacacgtttacggatacggttaatagagttgttcaaatcattatcactaatctcgccttccagctcataggtagcttctgcataaatcaacaggacttctgcaaaacggataatgtgggcattgtaataagcccctacatgataaatatcaggtagttcactgatatacttccacacacgatatccggtatttgtagagcaaatacccataaaactaaccggacattcagtagccacaccatgttgactaacataaatatatttacggccaggcacctgcaagacacaagtcatacgcggatcacggtcttcatattccgattgcacactttcataaccctggaaacacgtttctacattatcaataggaacaccattcttatccaaaaacatatcggcaaacttcttggttgccaaaagataaccagcgctaaccttatcagccatatcatggaaagttcctttcatgttcttagcatactgataatcaagaatagactcgcacgaattatcaccatcttccaaaaacaatttacggtatgaatccgcacctaatgacgcttcgtagtataaatcatattccggtttgtcgaaaataagttgccgggcacattctttggcaatccccaataatgccagtccatcactacgatgtttatgatttatagcccaggttccggcatacagtgctactcttgccctgaaagccacggctgccccactggttatacgtccggtttcggctactgccatttcagacttctttggtaataatagtgaagcatcatacaaatcctgcaagatggcatcttctacctctttacggggcgtacgttccataaacagttcaggagaatcaatatccaaagaatgtgtaactaaagggacatctccaaaacgattgagcaacttaaaatactggtatgcccggaagaacaacgcttctcctttgtatcgaagaatctttggatcagtagtatgcaaggcatcgacatgctccaataaaatatgaatcttgcgtagatatgcataacaatcatcccatactccatcactctccgatggcaaccaacgaccattactcacactgttaaatccaaaataagaagttgacaaatccgctttctgatcatattgggctaaattatcatccccattaaatttcattaaagaaggatataagccattcgcataaattttaaaatcattttccgtcagccaatagtcaccatccgacattttatctgcgggcatcagatccattccttggcaggaagacaatagtatagccactataaaactataaaatatattctttttcataatcaattaaaaattaagatttacaccaaacgagaaataacgcataaacggatacccagaataattcccattatcttcaggatcatatttgaaaggaatattatcaatttcaaacaagtcatttccgctaaaataaactctcaaacgatctacctttattttctgagtcaaaaagcgaggaatggtataaccaaactgtaaattctttaaacgtacataagccgcattcaccaacaggttatccgatgtacgatagttccataagttacggtcatcgtcatgagtcaatatcggatatttagcattcggacggtcagcagaccaagtattatgatagaattcggacaatggataatgccagtcaggatagaaaggtatcaaaggttctccgtcttgtacaactttacgtttggccactccttgaaaaaaaatgcttagatcaaaccccttccattccatatcgatattcaaaccgaaattataacggggattactggtacctaagtacacaagatcaccctgatatccacgtttaggatcacccgtcgcagtaatcgctccatcaccgtcgagatccagatacatcatatcacccacacgcagattatccggaactcccttcatttttttatactcgcgcaaagtagcttcgtctcgaataattcctcctgattgatatccaaaatatgcattggtagaataaccctgaatatttgatattaagcccgagcgcagtccggaaaatccacccaaattagtaaccttattgcgagaatcagaaatattaccacggacactataggaaaaatcattcaccttatctctccatgccaaagaaacttcccaacctttcacttcaagagaaccgttattggatgccggagcagtcgcacccaacagactcggataatctacagcaatcaacatatttttatttttcttatagaaccagtctacgctggcgctcaaacgattattaagtattgctatgtccagtccgatatttgttacttccagtttctcccaagtacgtgccaaagagaccatgttggaagatgcctgctgactcttctcctctttattgaatggataaggccaatccgaactgatgttaataatcggaatatagtcataacgtccgatccccccctgacaattacccatttgcccccaggaacctcttattttcaactggtcaaaaatgttcaaatctttaataaaatcttcttcagacagacgccaggcagcagaatatcctgtaaataatccccaacgatgtcctggagcaaaacgagaagttccatcataccggccattaatctcaacaatataacggtcattgtatacataactcaaacgaccgtacacagagcgcaacgtttccgcccaagtggcagcacctgtttcctgatccttcgaactacctaatgccagattaaaattatcacttgtaaaattcttacgcgtagccgagaaagtatcataagagaattcttcatgttgtgcacccgccatgaccttcaaatcatgtttctcagcgaatagtttatgatattccgcataaacattatagttacggtaccattgtttagagaaagctcttgaagcccaattttcagtcgtattatatctattcagcgaatcatcccaattccattgagcatattttcctccattagtggtatcatcatttacctgtcttctcaggatagcctgtccagaaattttcagttcaggtaaaatattccagtccaatgcaaaattgaaagtagtaatagcgttggcataaagggtatttcctccttcttccagttcttgtgctggattaccatatccttgccaagaataaaatttaccagacggagtataaagcggtgcccaaggtggttgtctatacccccatgccaaagcagtgccgatagctgaagaaaaatcatgatcatgtgccgtatatgaaatattggaatggaacaaaaggttttctagaaccttcacttcatttttcacacgcagtgaataacgtttactatcatcgtgaccaaattttaaaggagaatcttccgactgatagaagccagatacataaaagttatatctgtctgttcccccggatacattcaaagagtaattttgcagccctgagctttttcccaaaagagatttcgtccagtcatgatactgataatgcttagcaaaaccaagatacccacccatcactaccttatcactattttcacgaatcaagtccagctcatcttcagagtatacaggattatccgaaccgtcggaacaagcttctctgtccatttcggcaaactgaagcaagtttactttctcttttacccttccaggtgttttaaaagcatagtaagcattaaaatcaactttcaccttaccttttgcagcagatttcgtagtgaccaatacaaccccattagcagcacgattaccatagatagaggcttgagcatctttcaatacggagacactctcaatatcattaggattcaaaaaatttatatttccctctgcaccatcaataagtaccaaaggcgaaccgccatttacagaagagacatcacgaacactaaaagtagcttcgtcaccgggacggcttccctgaccgttacttctattaacgactaatccggggattaatccctgaagcgcattaatcggtgtagctgaaggtttagactgaaatgctttctggtcggcagtagctactgctccggcaaggtttgcccgcttcgtcgtaccataaccgacaaccaccacgtcatccagcattttactatcttcttccagtactacattgataattcctctgttgccaacctttttctgtacacttttatatccgataaaggatatctcaattatatctttcggagtagcactcacagtataaataccatagacattggtaatagtaccttttgtagttcctttaacggtcacattagctccaataatcatttctccatttgtatcgcagactgttcccgtaatgcttttggtctgtgcccatatccctacctgtgatgatagtaagcaagtaattagcaatattcgaataatattaaatttcataatatgaataaggttttgttgaactctcgcaacattgataggtcatatacatcatcgatgaatgttacggaatcctgttatttaatagaggttagaactatttttgaatggcataagccctcattaagaaattatcaaagacaatatggcagtttccatacatcttatcatttaaagttgtatcaaaaaaccacgctcctggatacttgtctttatcttctttaagcaaccatatttccggatcatgattatcatcacctgtagctacaatccattcagcgccacctttaccaaaagatacatcaacaccacttcgagataaattataatcaatcgtccaaactgcaggagcattctcagagtcaaactgcgacattggcggataatcctcccaagcaaaaacaaaatacatttcttcaaattgcgaagcctttttatccaaagcttttatatcgtaagtacccataagcaaatcaaaagttatttcgtaatgtcccacattctccaatataatcggattcggattatctgactttatgatatactgtccatcattactaattccatactttacttgagtctctggatccttactacttacaaagataattcttgtattagtcaccggagcaaaataagaagctgtaaacttatagctttccacactcttcttttccgccagcatcggaagtccaaacacaactttacttaaatcaattgaagtatccaacgtaaatatcttagtgtgtttctgattatgctctgcaaaagtcgatttgacagaaaccattggatcatatttagctgtatttccgtcttcatccgtcagcgtaaatacaacctgttttttgtccaaatcaccgcttgtacttatcggataatctttagtaaattcaacatggcgtccttcgtccgttgctatagcggttaaatcaattgtttcatcaatacccaatgccgtgcctttcactgtgagagtctttaatttcgtcctattactttccatgataaggctaacaggtaataccaaattatctgcaacactgaatgttacatcattattatcgacgtgagcgacaccaccattcaatacaatattaaaacccatttcctgtctgatttcaagacgaggagcttcaggtgtaaccaatacattcagtatttcagttttcgatttacccgaatgatcataaacaacaacctttacttcacccacagaacctctttctacatttccaggaataatcacagcttgtatcaagtcatattctgtaatataattctgatcgctaaaaggaattctttcactaaattcaaactctgcacattcaatctgaatatagttaataccagcatcatccgtcactttagccttaatattcacggtttcaccaggcaacccttcaagttcctcgccaagaaactcaatcatgggaggctgagtatcattagcattttcattgtcatctccgcacgaaatggcgaagagaacaagcaacgttacaaacaacgtaactaaataatgtttttttttcatattcaatagcttaaaattaatagatataaaagttaacgctataaataataccggtatattaaaaatgcgagtacttcatttaagtagatttttttaattgcttttcacgtgcccataatcttaaattttagcaaggttaatattgatataaataattaataatgcaaaattacgcaatcatatacgcattgtgtttatgaaaatgatatattaatttatgattctgaccgtacatgtattttttattcactcatatttttttgatattacatcgggggcttcttcaaatttggtggtattcctcttattatgaatgcagaatcttagctcttagtagttttattccggctttgttgaacatttgtcttttgaccgctttaattttattcactggtctcccagtaatccgttactgaaggggacatcaatgactgcctgtactgtctccctgtcttttttcaataccatatgcaaagttcgtcagtgccatgttacgtgttgcattcgctttttcaatctattttctaatatccttatcataagtattcccattgatcatatctctgaaattcgtacatacgtttaaaaattctttaatctatggtgaggacttatacagttccgctagtttagaattatccgattttccctttagaatgtattggcatatctgattctgtgaaactctctgtattttacttctgttttcaattctctcattatgctccttgacttccttcctcttttggtgatacattcttcgcaagccagatgctatccttccaataagtgccccactgattttactccccattttttgccaatattttccggttaatacaacccgcactaatgattgtaaccagttcggatacatatttaagagcagtcttctgtttcccattcaagtatgctcctattcttctgttgtgaatgttcttataaatgtagtagcttttcttgcccaaatgtgtggctgtatgctcaatgatcatcccctgcatttttaaattcagactttccctgtatatcctcaatttttctctgtgtcgggcatctcccatggtaaatatgttctggagaattaacgaagaagccgtatctctgtcaggatattcatatttgagcttttacttggtctgacgaattattttctctatttccggtatcatcgtatccgtcatattcttgattagatgaaatcggtcgcagatttgtgtaacaccggggattattctgtttatagactctgtgaaacatcttccacggtctctcatcatatattgtatttgaggattccagatgagccagttatcaagtgcttctccgcttctatcctctaacaaagcaataggtgtcatctggcctacgaccacccccatataatccttaccttttttataggcaaaatcatcaatacccacatcaatactttttattatgcattagaagattatgttgcccgtactgttgtaggatgcgtaagcaggaagagctactgaccgttatatgaaacaattgcaaaagaaaagaaacctttcggaaggtaagtttcaagcttatcgagctgatgcgttcctcaacaagatagctccgtctgccataccgacgaaccagaaaagacaatggttcgcagaatattttttgcagacaagaaacattgtcacaataatatttaccaacccttatgactaactccaaagtatgatcgtaaacttcaaaatcctgaatatgttgggagtagcaactgtgcaattagtgactgaaatgtccgcaataaggacaggaagcccccttgccggccgtatatagaaagaccgtcaatgaaccaacatcttcagagataccagcttgttgtagattatcgtagccaagactgaatctgaaattatggaataatcccctattttcggggattttctttttatataccgggaaaattacagtttctcactggggaacaattccttgaccgtga

SEQ ID NO: 3091 - DNA, 9238 bp, Unknown
  gut microbiota DNA sequence
atataataaagtattctaactaattcttaagtatatttcttatccaaaactccggtctgaaacattcaagttcgtccgcttctgtgatgaagaagatgaacatgattcactttcccgatagacaccaaacacttatccacactcaatgttgccaatctttataaaaggtgattagtcgaactgtgcttcaaatggctgaagcaacacctcaagataaagatttttcagggaaccgctgagaacgctgtccgaatacagattagcgtgactatcatcacttactgtctcgtagccattatccaatatgatatgtaactagaacgttcgacatacgaagtcttgcaaattctgcatatctcattaataagtaaaactactttgtaaaacatattaaataagcctgacttcaaaaatgttaaagttctatttgatccccttatttcagttatttttggaatatccctaatcaatatttaggtcttgcatattttttgaactcacttgccgtaaccccctcttttgtcttaaaaaacaaagaaaaatggctaacactatcgaatcctaattgataagcaatctccgatatggaatcatccgtatttgtaagaagctccttggccttactcaatttaagttgcaattgatattgagcaggtgaaattccgatgttctctttgaaagctttcctaaaccatgaataactaactcctaaatctgttgctattgcttccgctgtcttattcgtatgtaagtttttccgcatcataattcttgccagatttattttatccaaaacagaagtattaatccggcattgacttttataatacacttctcctaacatatggcatataatactcgcaataaaaactgcatatccggtacgttcttcctcaacaacttcaagaatatttgtatagagctcaagaatagattgactaataccgatattcaacaagggagttgaaggggaaaaataaccattacgtatccattcatctgctccatcccctttaaaccccacccaatattcagtccaacctgtatttgcatccggtcggtaggtatgtcgctcgcctggaaacaacataattatcgtacctgcagatactttggtagttgcacaagaatcagaagtgaaatacccactccctgctacaatatagacaaattgatattcatgaagtatcctaccatatctcttaaagttataattgtctggatgtatagacaatggataatgacaacgtggggccacaatctgatatcccactgtagtacataaaatcccccatttagcagtatttgaataattagcagtcaggtagtgtaaaaggtatttttcagagtttttcatattgtatcaaatttataaaaagatatatcaaaaaataacacatataaccatagtgtatttctaactttgtatcgcaaaattacattatacaacaacaacttaaaagaaataagtattaaaaaatattgcaaaagtatattttacaatccagcaatcattccataatacttcaaaagtgattaagctttttatttaaaatatgaaattgataaaagtattctttctaatagtgtttatactatgttgcgaattaacatcagcccagcaacgttttaaaatagaaaatggttctttcctcattgttggaaaaaggacacaactgatttgtggtgaaatgcattattcgtgtattcctcacgaatattggagagaccgtttgaaaagaacaaaagcaatgggattaaataccatatctacttacgttttggggaattttcataaaagacaactaggtatttttgacttcaaaggtcaagctgatttatctcattttataaaattgacacaagaagaaagtctttatgtattattacgtccaggcccctatgtatttgcggaatgggactttggaggatatccttataggctcttaaatgaagaaggtatggttttccgaagtagaaatgaacactttttaaaagcatgtgaaaggtatattatgcgattgggagaagaactatcttcacaaactattaaccgaggggacaacatcctcatggtacaattggagaatgaatatggttcttatggcgatgataagatatatctgagtgctttaaaaaatatgattcaaaaagcaggattcgacattccacttctcacatgtgacagaggagggcaaatagaagccggtcatcttgagggagtatttcctgctatcaatggagtcttaggagatgatattttaagattgtagatcgataccaaaaaggtggtccctattttattgcagaattgtatacgctgataatgaacaaacagataaaaatattggcatagctgaaaatctaatagatagcgacatttcttctttttggcatacgagtccaaataaaccgggacatcatccacactgtataatcattgacatgaatgaaatatataaagtaaaatctatccgcctaccttcacgtgaaggcgcatttttaacgggaatagttcgtgacttccgcatttacgcacgtcctcaatttttcttatttaaatctatttagccatgaaaaaagtattatttatatgcgttacaatgttattaatatgtatctcaggaaaggctaccgagaggaaccttcttcttattccatatccacaacaagtatcaataaaacaaggtaactataatctaacagacaacgtaaaaataggagcagatccgctttttacacaagaactgaagaaactgcaagaggtactcacagaagacttcggattaaaatcccaaatagtaaaaccttccaaagctgatatttctctttgctacgatgcttccttcatgcaggaagaaaaagaagcctatcagttggaagtaactgacatgaaaataactatccgcgcccaaatggcaacgggcatattttacggcattcagtcgttgcgccaacttatcaaatcggaagcaggaaaatggataatcccaaaattgaccataactgactatcctgcactttcgtggcgttcatttatgttggacgaaggacgttattttaaaggagaaaaggtagtaaagcaaattctggatgaaatggctttgctaaagatgaatgtgtttcaatggcacctgaccgatgatcaaggttggcgcattgaaataaaaaaataccctcgtctcacggaaatcggagcatttcgcgactctacccaaatggaatggtacgaaagtcaccattacgacggcaagccacatggcggattctatacccagacacaaatccgtaatattataaaatatgcttccgaacgacatataactattattcctgaaattgaaatgcccggtcacagtgctgctgctattgcagcttatccttggttaagtgcaacaggaaaagaaataaaagtaccctgcaatttcggagttcaatacgacgtgttcaatgttacagatccgaaagttttgaattttcttaatgatgtcatagatgaagtgaccgcgttattttcctcgggaatattacatattggtggagatgaagttcggtatgaccaatggaatgcatcatcttctgtccaaaaatttattcaagaaaaaggattttcttccgcttccgacatacaagtatggttcacaaaccaaatgtcgaaagtaattgctcaaaaggggtggcgtatgatggggtggaatgacattacaggcgaaaaactacaccactttcaaagcggagataaagaaggaaccgaacgtttagcacgaggtactatcgtacaattttggaaaggagattccgacatgctgcaacgtgctgccgaacaagggcagcatatagtcaactcttacaacaattttacctacttaaattatagttatgaatatgattctttacaagcgacatacgaattcaaacctatttcattgcaacgtgcctatgaattcaagcctgtaccggaaaacttcccagtacatttagttcctcaaattctcggagccagttgtcagatgtggggagaatggatccccactgtagaaagtatgaactatcatatttaccctcgcataggtgcatatgcagaagttttttggacgctcccaatacaaaaagattacgtccgtttccgaaaatcattagagtatttcctgacacgttggaaaaaacaaggaattatttatggtcccacaagaaacaaccaaattcattccacacaacagaccaacatcgaatttggaatccctgatgaatataatgatccctaccgatatatcaccggaacttcagacaaagctttgtctattggaaattaatgccacctatagacatagaattgaactgaatcaattgaataatcaggcaagcgtttctttttttctcatctctgaacgaaaagtagttcgaaataccatttaggagcaaaagcgttattaagtaataaaaaatttaattccaataaaaataaaggataactattaaccactcaaaaaatggttcctacatgctatctgtaagcaatagaaatggagtacaacatgattaccgaccaactgtagaaaaaacaccctaaacgagggagattgacatcaaataggaataagttttgatactactcggcaagaacttcgcctatattatgacagtcacaatgtagccatatattataccgaaagtataaataatgcgaatctatatttgattcattagttaaaaattagggtaatcaatgtgatggctatttttcccatcgtgtgtactagaagcccagatgtaaatctgaccttcatcgctctttgaatatttgttttttcattcaaccagttgaacaatgattcaatgagttgtctgactttagaaactgccgttgaaaacaagtctcttgccactttctcccttttggttatttcaggtgattctcctttgatagcttttacaggagtaaataacgagagttttttgcattcttgcgtctctttatagaatagtatatctgaatatattttatcggcatatatttctctattgttctgatttcccacaccttactcttttgaatacaatacagttgagtcattttcatccgcagcggaaagtataagcagttcaagaaaaaaggtataattccttttctacggaaagccactacatggagttttagtccgaagtaatatacgttttttgtcgaataatatcctctggaagtaatctcagtggacatctttcctgctttgttctttcccgagcaagtaatgataggcattgggtcgactaatgatttcatactgccacaatcttgaggtttgaatgaattaacagccagacaagttccctaattgcttctggcatcaaaatcaatctataattgaatgcttggtaagaagaagacaagtcgaggaaccatgaaagcaggtattccttggcaaaaggatgattgttattactgaacttctggtagtagaatttgagtgaagactcgtaaacatcgcagatatacatatatatttttataagttttaattctttctccttgagaatcattattagaacaacgaggactttattcttataatacactgattatcaataaaattgagaaataattaatgagataattaacttaataataacgttttaacaagcaaaaaggtagatgattgtcaactgctgattcgtataaataatttaaatagtggatttcctttcaatttaggaagcatagacagcagtaaatggcaagctttcattgattaccttgaccatcttagttttacaacaaaactaaatcagcagattggtttgctaaagattttaagatattgactaaccaagtaccctagaattatcaattacgtccaagcaattaagcattatgggattcaacatttatcatgaattgaaaagaagcattattaaaactctggataatatatatctctagctctatctaagtactctttacttttaggaaattggaaagatgcaaaatggagtaattctttatatttcagaaaagtaacttctttttagtcacagttaagtttaccttacagttgagtactccttgtcctacaagataaccattggcagcaatccatctaagaaaagattttaatattctgaattgttttacagtggtacgattacgatatccattcttcacgtagcatttttttaattctgtcattttattctcatcaagtatcactagagaaatatctggatcacagctatttaattgattccatacttgaacatatttgtgatgtacagattcactccaacttctttctatagaacaaacttctaagaaatcattgaaaatttcacgaaaagatttttctctctctattgaaccaactactactatctccttttctattctccccagcttctcattaaccaactctttcaactcttttgtggtagggatttgggaatgtacaccatactctgtgaaagattcttcaatacattccaaaaattgagaaatgcgattattaatatcacgggcaacatatacctttccaccaactttatgagtagtgttgtatctgactctctggttctcattatcccatttttcaagatcagcattgcaacctacagaaaagccaacttcacacttcctgttattccatctgacgcgaatcataacctgtccgttcttgtgtagaaaagctctacaactgtgactaattcccatcatatatcttactactttatttgttagtttggagcaaatttagaaagaaaaaatcgtggggagtaagcgtctatttctactcccctttttttgagcgtacatgattttatgtgctataaaaagatgcaattcgccacatacattactgatctacaatagtatacaaaattaatccaaagcaattgtggtcaaagctatagtccgatacgctccacttcttcaaaagagttattcggcaacgagttactcttttttttgatttacttatatgaagtggctttactacattttatacccaccaaataaaaaaaggacctttattcaaggtccttttttattacttcatccatttcttttatacgtttcttgcggttcttgataggaccgtctttcgtatcatctttgaaaacattatctgcacggtcagttacttcactgctccattcttcaaactgatttttagccggacggccattcggttcgatattctcttcggcaatcgaatcgtgtctgttaatcatatcatccatatcttttctattttaataggttatagaaacaagacaataaaacaggcaaaaagttcttagttttaatcatttttattctccctaacaaacatatatgtatcggcccaaatcagccataacacagcatcttgatattcaacatcttatttacatctattttgggtttaaaaccaagcccctgttcctttaaaagaaacgacctgtttctcaccgaggaacgacttcttccttttaaagaaacaatacctttattaaatcctggcacaaaaccagccatattaatgagaatactcgtatctttattgtcgaattaatcaataaattgtgagatgtcaaaagtattaggatttatgaagcaagtagcctatgggctacaaatggagggaaactttggaactgctcatgtctatcgcagcagtctcaatgccattattgcttatcgtgggaaagatgattttgccttcaatgaggtaacttcagagtggttaaaagggttcgaagtttatcttcgtagtcgtgggtgtagctggaatacggtttctacctatcttcgtacctttcgtgccgtttacaatcgtgccgtcgatcttcgtcgggcaccatacgttccgcatctgttccgttcggtgtatacgggaactcgtgccgaccataaacgggctttgggtaatgacgatatgaaaagggtcttttgcaaattgtcacaatcttcgggtgcatcttcgaatatgcgtcgtgcacaagaatttttcattcttatgtttctacttcgaggtatgccgtttgtcgatcttgcttatctacgcaagagtgatttgcgtgataatgtgatcacgtatcgtcggcgtaaaacaggccgtcccctgtcggtgacgttaactccggaagcaatgattctggtaaagaaatacatgaaccgcgattcttcttctccttatctctttccttttttggaaagccgagaaggaacaaaagaagcgtatcgtgaatatcagttggcgttgcgtagctttaatcaacaactaatgttgctgggagagttattaggactaggcgataaattaagctcgtacgtggctaaacacaaccaattctctatctaactgaaaataaaatagttatcactcactttgtagataataggtaacactttagaaacgagcgaattacaatattctgttttattctgcatcaactcaaagaagctttttttcaggacaaaaataccaaagacgctgacaattagcaaatatctccggtaagatttgcatgttttaactccgtttttcatcttcaattaaaaagatcgaggttttcctgcatagtgtcgtggcgaaagagaccggcaatatcttctgaatgaccgacagatccctattctccaaccccaacaagtttagttgtacaatggaactaatagagaaggaggtcaataactccagaagaggatttcattctgcatttcaagaacaaatacagcaatacttatcctcttgcatggatgcttgtggacatgttgtcaatgggcatcgtaactagcatccatgaaaatataaaatccaatccattgaaaaaagattacggtgtgctatgatctatccgttcccgttttcacttcgtggctgacagtcataatccttataagaaattcctgctgtcatcatacaagggtataaaacaagcagtacgccatcaatccgatggtagtccggaggatgcaattcccttggataaacgatatgatatcactacacaggacattttatgaaatctgcatcatttagtggtttatcaacattatatcgctggacaacgatatgaaacagcatttccaaaagttactgggttaatatccgaaatattgacagcaagtcaatgaacattcccctggattggcaggatgagcctttgcggagaatataaaatccacctttcatctatatttcttttgtaaaaagaacagatgttggaagatggttgctcctgctctatacggataaggcac

SEQ ID NO: 3092 - DNA, 250 bp, Unknown
  gut microbiota DNA sequence
atagttttgaattgcattagccttagcaagactgtcaatacgcttatcttctaaaaactggaaatgatttgacatctgcttggcattttgacgaagctttagctgttggatccgattttgaaccgtatcaatcgacagttttactcgatttaattgccagagttctttaccgattgcgaccatctcattatagacgaaacgactggcatcgctgttaaccttgattatttgtttctggtaatcactcgga

SEQ ID NO: 3093 - DNA, 2752 bp, Unknown
  gut microbiota DNA sequence
tgctatcataaaatgtagacaagagtcttctacaaattattgttatacacaagcattagctaagtatgaaagaagtaaaagaacatctgacagagtatacgaagaatgtataaaaaaataattatatatagtcttgaataatgtaatgtggcttaccagcattgcaatgtgttatttagattgctttattgacaacttaaactacacatttcaagatttcctaattatcttctttgaacttctcgcacgtataacacttgtaataggagcaatcagtatattcccacaagaaccatactctaataaaagaatgtggttctattacatcatcatgggtgggagtttgactattattgacacatttatacgattggcaggtactttacaaaagttattattttaattccttttgaagaaaacgtccaaatcaatcatcaaccacttctatcagattctcatcctccaatatttttttcaactgataataaagttctaaatcttttgaataatcttctactctctccgacatcttttctatcagagaactgtgtttttcttctgaaacaggtgctgaagcctcatcaaattcggctacttccacttctattacatctcccacctctaatatgctgccattccatataaagtgtacttcttcaggcattttcaaacctccaacactccaatatgcgccactatgccaagtaatgtcagcggtgaaaagtgtcccgcagtgaggaataccagctttgcatactatatctttatattttacaataattcctttcatcctatataagtcctttctcttgaagtttaattttgagttgttcatactgttgtatcatccattccctgtcacatttcgtctttttacatggtgacacctcatctgtttcaataacttttattattatcttatcaccaatctccggcttacctttaagccaagtaagatcgttagaacaatcacgaccgatcaaactaatagtagaacccaaaggataaccatacccgagtattacagatacaacatgatctgaagccattattataggcttctcatcgttaatatatatttcaaatcctatcataacctactatttcttgttatattggacgagggcaactccaaacaccttgtgctacacaatagtcaaaacatcgttgacacattgtatatccccaccctccagtattagggtcaccataactagtacccgtacagcccacgtacttttccatgcaaaaatccatatcgctgtttccctcattttctttacacaaaataacctcataaatgaatcctgccgcagtaaaaacagtagcaacagaggccacaatttcgccgaaaggcgtcggttcaccaatagcaatcgtccaaactgtcgctgtaattttgcgacaccattctcctatatttcctccatcctcaggtcctcttgttttaaccttcgataattttatattattatatggagtccttaacattaaaccttggtgctcaagataaactattttttgtcctccatagtataacacagcaataacattcaacaatctttcttgttctatttctgggacttgtgcatgaatttctttatttagagcgaccaacctagccaataagtcttgagaagatctacttttctcacactcaccaataattttgtgaataaactccagctgaatatccgtcaacgaattatacctttccataaattcagtcgcactcatcatctcaattgactgaatctttccggtagcacgacttcttgccattgtaggacttgcattataccaatcttcataaaatttcttacgaaaatccttaaaatcaacgacttccgaataatccatatttaaatcattcagtttcgctaccgtaatttcaatttctttagccacagctttcccataagcctcaacctgtttaggaaaatcaatttcctcctctacaatttcttcttcaaaaacagactgtttatctataaaatcatcactttgcgaacaactttgcgtaagcaaagcaatactaaatacaataaaaattaagttcttcatcatctttggttcttttaaattaataatcaatatatactggctaatattttcacatacagaataggcttatttatcgcattagaagttataaaaacgtctctaattacttctccagactcttccgacttaaaattaaaactaaccattgccgaatcattaggagaaacaacaaattcatcagtgtggtctaatagattcaagcaagagcaacttgtaaaaatcctagacacctttaaaggatatttcccatcattataaatagagatcacaaaaacattatcttcactaactgcacaatctgaaagagagactacctcactatttactctaatattaggttcatcatctattttaaaatttggattcaaaacttttttagcagtaataaactcatttttaaacaattctaaataataaggattctccaatttcatcatcaaattcgctaatgttttagtttcaatagtatcattatccattagttccccaaccatacccaaataaacagaatatggatataccaatgaatcaattgagttatttaatgcagttggaatatatataccttgattcaaatccattttacacttcaaaacttgattcaacaaatggataacattatatttaggaattttaaagcggttaggataatgataattagttattttcatatcagaaatcgcctcgg

SEQ ID NO: 3094 - DNA, 3934 bp, Unknown
  gut microbiota DNA sequence
gccgaccaacaatctggatatacagagtatcgacatcatcactgcgactatcagaaactatacaggtaccgtcatagccatttcgcacgataattatttcattcgagaaatcggtatcgaacagcgtattgtattaagttaatccattgacattttatcagacaaagtattaaatatcaatacagttttttataccttcgcagcgcgaagcaaaagaagaagattaaaatgaataaaacaacgcaatcatggtggttcgtcttttataaagaccagctattacttgagaagaaagagaacggcacatttgctcttccttatggagaaattccgcctatcactattaaagaaaaaacgacggtacatactatcacaacattagagggaaagacttgtaagtctttctccctctcctcgccttttgaagaatcggcacagtatgtaatgaccggacttcgtgcctcttatgattatctcccgctatctcactatcaggcagcaggaaaagcgcatgagattctgcactgggaccggaacagtcgtttctgttctgcctgcggcactcctatggaacagaaagaggacatcatgaaacgttgcccgaaatgcggacgggaagtatatccttctatttctactgcaattctcgtcttagtaagaaaagaagattcattgctcctggtccatgcccgtaacttcaagggaacgttcaacagcctcgtagccggattcctggagacgggcgagacattagaggagtgcgtagcgcgtgaagtgaaagaggaaacgggactggatgtgacgaacatcacctatttcggcaatcaagcatggccttatcccagcggattaatggttgggttcattgcagattatgccggaggggaaatcaggttgcaggaggaagaactgagttccggagacttctacacacgggacaacttgccggaacttccccgaaagctgagcctcgcacgaaagatgatcgactggtggctggaatgctctcacaaataatcggctatggaaaacatcatcaaaggtatccggcaatattatccggtatcggacagttctctggaggttcttttcagtcacatggaaaagctggaacttcctaaaaaacacttactgatacgcggtggtgtagcagaccgtcacgtctactttatcgaaaaaggattttgccggtcttattgtttacacgacggcgaagaaatcacgatatggttttcacgcgaaggtgatatcacttttgccatgaaagacttgtatcacgacgaaccgggatacgaatatgtagaattgttggaggactgcgaattatatgccatacgtatcgaagacttgaatcggatttatgaaaccaacatcgagattgccaactggggacgggttattcatcaggaatgcctgctatatatggatatgcaccatatcaaccggctctatcttccggctaaggaacgttacgaacaactcttacgtgaacaacccgatgtcattcaccgtgcccaactggggtatatagcttcctttcttggcatgactccccaacatcttagccgtctgcgttccgaatcctaagttcttttttaatctatgtgaatttttatctcataagaaaacactacttttgcagtcgaatacaaaaaaactgataagtatcgtgattaacacattaacttctttacggatattctttgccctaatggtatttggggcgcactgctacgtcattgattcaagtttcgatgctcatttctttaaagaagggtttgtcggagtcagtttcttttttgtgctcagcggttttattattgcttacaactatcaggagaagttattggaaaagaccgctaccaaacgaacattttgggtagcgcgcctcgcccgcatttatcccttgcatttactgacattattaattgccgtatgcataggaggatacgttcaatatagcggcacggcagactggataaaacactttgccgcctccacctttctcctacaaccgttcttcccctctgccgactacttcttttcattcaacagtccttcgtggagtttgggatgcgaacagttgttttatttctgctttcctctgattgttcctttcttgcataccaaaagaagcctgtttatcacactgctcatctgtcttccaattatgctggcaggcatgtatctgaccaacgaggagcaaatcaaagcatactggtatgtaaatccattcacccgcctgcctgactttttcgtaggtgtcctgctttaccagttctaccggtcattatgtaataaaaaactttcttattccaccggaactttattagaggcaggagccgttgccttatttttactgttcttcctctgcgccgcagacattcctaaagtctatcgctattcttgttattactggttacccgtctcgctaatcattcttatattcgccttacaacagggaggcatatcccgattgctatccaaccggttcttaatcataggcggagaaatcagttatagtttctacttgatacatttgtttatcatagatgcatatatgcgaatgtccgcccactatcattggcagatacaatggacaataagtgtccccgtcattctctgcatcaccattatactcagcctgctttctttttattattttgaaaagcctgccaacaaatgggtaaaacgaatattcactaaaaaaacaatcataaatcaaccccatggaattatcaacaaaaacaccacgaattgaagtagtagacgctctcagaggttttgccgtaatggctatcctcctggtacataacctggagcatttcattttccccgtctatccggaaagttctcccgaatggcttaccattttagatgccggagtatttaatgcaacattctcattgtttgcaggaaaatcttatgcaatcttcgccctgcttttcggattcactttctatatccaatcgcacaaccagcagttgaaaggaaaagacttcggctaccgtttcttatggagaatggtattgcttgcaggctttgctactctcaatgctgccttttttccggcaggagatgtgttgcttctgttcgttgtggtcggcatcgtactgtttatcgtacgcaaatggagtgacaaagctattttaatcactgctatcttcttctcactacaaccgattgaatggttccactacattatgagccttttcaatcctgcctataccctgcccgacttaaatgtcggagcgatgtatgctgaagtagcagcttataccaaaggtggaaacttctgggaattcctgataggtaatgtcaccttgggacagaaagccagtttgttttgggctatcggcgccggacgtttcttacaaactgccggacttttcctattcggcttgtacatcggacgcaaacagttattcgtcaccaccgaatctcatttgaaattttgggtaaaagcgctcatcattgctgctatcagcttcgcacctctttactctttgaaagagcaaatcatgcagagtgacaacagtctgattcaacagacagtgggtaccgcttttgatatgtggcagaaattcgcgttcactatcgtattgatttcctccttcatcctactgtatcagaaagctaagtttcaaaaagctgtttccagcctccgcttttacggcaagatgagtctgacaaactatatttcccaatctgttctgggtgccattatctatttcccattcggattttatctggctccttactgcggatatactctaagcttgattataggtattgttctttgtatcttacaggttcagttctgtaaatggtggctgtccggacataaacagggaccattggagacgatatggcataaatggacttggatagggagcaaataatgcaaaaatgtatgaattgaataatttgagct

SEQ ID NO: 3095 - DNA, 9770 bp, Unknown
  gut microbiota DNA sequence
gttcgcttcacgcgactatgtagtgtatgtgattcagcctagcggtactatcggtttcggacaggaattttctgcacgccacgtcaacgcgtggggaaaacgtactgctgacgatattattgaaggaacaaaacagttctgcaaggaacacccgtttgtagacgaaaaacgaatcggatgtctcggtgcttcctacggaggattcatgacgcagtatctgcaaactcaaactgacatctttgccgctgccgtgtctcatgcaggtatcagcgatgtgaccagctattggggagaaggttactggggctattcatacaatgcgattgccgctgccgacagctacccctggaaaaacccggatctgtttaccaaacaaggctctttattcaatgctgacaagatcaacactccattgctattgttgcacggaaccgtagataccaatgtacccataggtgaaagtatacagcttttcaatgccttgaagatattaggaaagactgttgaattcatcacagtagacggtgagaatcattttatttcagattacgacaagcgtatcaaatggcacaattctattatggcatggtttgcacgctggttgcaggatcgcccggaatggtggaatgagatgtatcccgaacgtcatttgtaactcccggtaaacaggagtactattcccaaataataaggtgccgctgatcgaatgtcaacggcaccttatctttttataatcaatgttcttttatctctttacagcagcaatcaattcttctgccgaaagaagattctgttctcctgtctccatattcttcagcataactttgccctcattcatctcgttttcacctacgatagcgacaaacggaatattcttcgcattggcatagctcatttgttttttcatcttggaggcatccgggaagatttcggcacggatacctgctgcacgcacttttgccaaaacacccatagagaaagccgcttccttttcaccgaaattgatgaataacacttctgttccgttcacagcttctttcggataaagttcgagctggttcaacacatcgaagatacggtctgcaccgaaagagataccgacaccggatacccccgacataccgaatactccggtcagattgtcatagcgtccaccgcctgtgatactgccgatttgtacgtccaacgccttcacttcaaaaatagcccctgtatagtagttcaatccgcgggccaatgtcaggtcaagttcaatttcattcttcagccccattgtttccaatgtattcagaataaactcactttcctccactcccttcaatcctacttcactggctgacaacacttctttcaatgtacccagtttctccgcattcgtgccgttaagaagaataataggctgcaatttggcaatagcctcatcactgatccctttctctttcagttcggcattcacgttgtccagaccgatcttatccagcttatctatggctacggttatatcgacaatcttatcagcttcaccgataatctcggcaataccggaaagaatcttacgattattaatcttgatgcatacacaaataccgaaacggctgaatacagtatcaacaatctgcatcagttctacctcgttcagcaacgaatcactacctaccacatccgcatcacattgataaaactcacgataacgccctttctgcgggcggtcggcacgccataccggctgaatctgatagcgtttgaaagggaacgtgatttcgtcacggtgcatcactacataacgggcaaaaggtacagtcaagtcataacgcaatcctttctcacagaatttgcttgccaactttgctgcattacggctcaacaattcctcgtcagtgataccggaaaaataatctcccgagttctgaatcttaaaaagaagtttgtcgccttcatctccatactttcccatgagtgtagaaagcatttccatagatggagtttctatctgctggaaaccataaagatgatatacgtcacgaatcgtattaaatatataattacgcttcgccatttctaccggcgagaagtcacgagttcctttaggaatacttggttttgctgccataatattactgtttataattttaattgcgcaaatttactgcaaatttccgagcaacacttgcatatatctgaaaaaatcgtcaacattctaccctaagttgtgcaaaacccgaatatatgataacgtatgacaaacaaaagagtgccttccagaatcctaatgcggactaagaaggcactcttttatattttatggagaagtttttagtctcttctacccatgaagatcataatgtagtaaatcaacgtagccaatgaacccaacgcagctactacataagtgtatgcagcggaacgaagtgcatcttcagcttgtctgtgattatacgagttggtgatcccggatgaactcagccaaacgagtgcacgcttacttgcattgatttccaccggcaaggtgataaagctgaacaatgtagtcatggcaaacaatataatacctgccaacaataactgagggaatgtattcagcaataaaatacctcccaacaacacccatgtcatgatagaagacgcaaagctcactaccgggaccaatgcgctacgcattttcaacggcgcatacatacgtgcgtgctgaacagcgtgcccacattcgtgtgcagctacggcagccgccatgatactgttactttcatacacaccttcactcaaattcactgttttatttgcaggattgtagtggtcggtcaatcgtcccggagtatgtgttacttgtacatcataaattccattgtcatgcaacatcttcaaagccacgtcgcgtcctgtcatgccattgccggtagggatcttggagtacttcttgaatttgttctgcaaattcatctgcaccagccaacttactacggcaattccaataaataatacccaataagacatcatatacttttcgttttaattattactctatatctataaacaaattgtttgccaaaaatacggggaaactatcaatgtcagaatagtttccccgtgcttttatgaagaattagctaaaaattagtcaatcgtaagttctaccacatagtcaatatctttcgggacttccgcaaattccagcagaacgcccgctttcgttttggtaaggcgaaccggagactgatctttaaatacaaccgccttcttcactttcttatctgtcaaaggcaggaataatgctttatctttcaaatccagaatatgcacatagagtttgttccctttctgtgtagtcactccccaatcgtgaggcgcaaccacaccgccacgtgttccatagattgtctctccgtattgtttcatccactcgcccatctcttgcaaacgttgtactgccactgcaggaagttctccgtcaggttgaggaccgatgttcatcagaagattggcattcttgccggcagccttcaccagataatgaatcaatgttttggtagacttatagttctggtcggtaatcttatacccccacatcccattcatcgtttcacaagtttccagcggcaggtgacttacatcctgtccggagagccctgccgtattctcacccggcaggtcacgttcgaagatttgaatatcctcaccggcaaaaggcgtctgatgatgattatttccgaccagacaccccggttggagcttatgaatcaaagcatactgttcgggcaattcccaatcaaagtctttattctgatcctgatcccaccagccgtcgaaccagatagcacctacgggaccgtagtttgtaagcaattccgtcaactggttattcataaattgataatagcttttccagtttccttttgaatccggccgccccgttccacgccctgttcgtccccagggatagtcttcacgcacccagtcgagatgcgaatagtagaaatgaagtttgattccatgtttggcacaggcagcagcaagctccttcacaatgtctcttttgaaaggagtagctttcaccacattataatccgaatatttggtatcaaacatcgagaaaccctcgtggtgacgggtcgtgaaacagatatatctggctcccgaagccttgatagactgcacccacttatccgcatcaaacttggatggataaaatccacctgccagtttggcatactctttataattcagatttatgtttgtcatagtccattcaccggtagcaagcattgcatacagtccccaatgaaggaaaataccaaacttattatcctgaaactcttcccgtgctttcaagttttcttctgtcggctgataggaagactgggcaaaagccccacaactcatggcgagtaataaaagaaaagaaataaaacgtgttttcataaggcatttattatttgtgtccatactaagcaacaaagatttgaacaagaaaggcggagtttgtccaatctccgccttcccaaaatataatagaacaaatgttattcttccgtataacgttcgatagtctgcgctctgtccggtcctacggatacaatcttgatttgtacgccaagttgttcttcgaggaaagtcagatatgcgttgaattcttcggggaattcatcttcgctctgcatcttcgtcatgtccgtctgccagcccggaagttctgcatatacaggttccaccccttcagtgatgtcgtatgggaagtaatcaatttcctcaccgttaactttgtaagcaacacaagccttgattgtttcgaaagtatcgagcacatcgctcttcatcataatcaatttggtaaccccgtttatcataacggaatatttcaacgcaacgaggtcaatccaaccgcaacgacgcttacgacctgtaaccgaaccgaactcatgtcccagcgtacacatcttgtctcctgtttcatcaaacagttcagtcgggaaaggacctgctcctacgcgagtacaatatgctttgaagataccgtaaacttctccgatacggttgggagctacgcccaatccggtgcaggcaccggcacaaactgtattggaagaagtaacaaacggatacgaaccgaagtcgatatcaagcatagtaccttgtgcaccttcacaaagaacactctttccgtccttcaacagattgtttacttcatgttcgctatctacaaaatggaactgtttcagatattcgataccttccaaccatgccttttccagttcagcaagatcatattcgtagttcaggcttttcaggatttgttcgtgacgagcctttgcagcagcgtatttctgatcgaaattatgaaggatatcacctacacggacaccgttacggcttactttatccgtatatgtaggaccgatccccttaccggtagttcccactttggcatctcctttggcagcttcgtaagcagcgtccaggatacggtgtgtcggaagaatgagatgcgctttctttgagatgtgcaaacgttctttcagcggatgccctgatgcttcaagcgcttctgcttctgccttaaacagtgccgggtcaagtaccacaccattaccgatgatgtttaccttgtttccctgaaaaataccggaagggatagaacgaagcacatacttctgtccttcaaactcaagtgtgtgaccggcattcgggccgccctggaaacgagcaaccacatcgtacttaggtgttaatacgtcgactacttttcctttaccttcgtcgccccattgtaatcctaatagaacatctactttcatttttcttttttattgttgttatttacttttttccgtttgttagctctgtcgcacttgctgcatataccatatatatataaggagtaatgcgaaagttgaaagcggcttaattttgtattttcaatggcatgctgcaactcctcgttctgaaactcggtcactttaccgcactgagtacatatctggtgatgatgtgtctcgcgattatatgatttttcgtattgggaggaagtgccgaactggtgcttgataaccagccgcgcattgataagaaggataatagtattgtagagagtcgcccggctcacccggaaattctcctggtccatcatccgcgaatagagcatatctatatcgaaatggccgtcaatagaatagatagtatcgagtatggcgtagcgttcaggagtcttacgatgcccgttcgccgtgagatattccgtaaatatctgccttactgtatctttcacattttgagtttccattatcagccaaaattagcgcgaacaaagttaagccttttttgcggaaagcaaaagaaattcctctaaaagaaaatacaatgttatctgttattaaataataaggtgataaagttatggtcaaatccgtccccctatcaccttatacaatcatagtcttattatattataaatctgcagcctcttctttcaccatattataaagtatctgctccgcttctacctcagaatcggccattccttctaccaaccggcacacctgaaaagcgtgttcctcgttatgctgcatatacttgcggatcaccagcaacgccgcattacgcacgtgataactctcggaatgaactgcacagattgcctggtcgagcaattcgcctgaggcccgttccgtcatatcacctttcttcatcaggagacgggcggcagtcaggaaaccacaggtttgcacatattcctgttcatccgcaatccagtgaagagatttggcaggggcatacggcaaatgctgaaaaagattcatgcaagtcaactcggctatttcgatattttgaatatcctctacccagatgtccgcaatctccggataaaaggtatcaatcggttgaagcatggcagccatgatcttacactcgcgaatattttctttccacaaggcttgcgccaggtcatgattcttctcatagccttcggcaatcatcttgatacggggcagttctacaccgaaattgagtttgtagagcagccctttctcacgcatactttgggacacagccccgttcatagagagacggagctgtgttttgatatcttttaattgttctttaatatccatattccgattagttgtttaccgaaggcaatggagagtaatccttgctgtaacgcaacatttgctctacataaccttcactataatccacagtgacatccgtaatatttccattatcatccgtcaccagttcgtatttcggattcacaaaacctttgtaaggagccagattcagtttcttgtaacgttccaatacttcagcgtgaagaaccggatctactttcacagcataattttctaccaatgcacgcgcaccctcaaagtcaccggtcgacttgatacgttggatttcagccagcagttcgccgaaaagttcacgcactttctggtagtcattgattacgacatacgtctttccgtctttcttcaccatttcgaccactttatcggcagcacctttctcaaacacccaacgggcaatcaactgacggttacgcatatgagcctcctcaacagtatttcccggttcgatgcgtaccaactgtgtcattaacccgttcattaaataagtataatattgagccttataagcatcgggagaagaaaggagtttcagttccaccagtttcgggtcggctacataataaagtccgaacaaatcggcacgggcttcttcgatcgtagaaccataagccttcaaagcatcagggtccactcccggaagcaatttgccggaaccgtgtccaaggcattcgtgcaaatccgtatgaagctcgtccgtcagatcggcataagtatcaatcagttttatttccgcgtcgctgtatacaaattcttcgttgaatccattgccatgagcagctttgttataagcatcggtaatatttccgatagtcacggatttagatccgtgatgcgcacgaatccagttagcattcggaaggttgataccaatcgctgtcgccggataaagatcaccggcaaggatagcggcagtgattactttagccgatacacctttcacttcatctttcttgaaagctttgtccaccggagaatggtcttcaaaccactgggcattactgctgataatttccgtgcggtgagtagattcgatatccttgaaattaaccaacgattcccaactggctttcatgcccagcgggtcgccataactttcggtaaacccgttcacaaagtcaatccgcgaatcaaggtccttcacccaaagaattgcatactcgtcaaagtccttcaagttacccgtttcatagaaccggatcaacttgctgataaccgctttctgcgcctcattctcagcaacagtttccgctttcttcaaccagtagacaatcttctcaatcgcctgcgtataaagtccgcctactttccataccttttcctccaactttccattctctttcatcagacgactgttcaagccatacgacaccggagtctcgtccttcgggtctttcattgcattgtagaagtcttcggcttccttctgcgtcactccgtcgtagtagttgcaggcggaggtcagcacaaggtcttcaccgtcagcctgattcacccgcttcggcatgatagccgggtcgaaaatcacggggaacagttcagcgcaaagttgttcggcagtctgtccgtctgataacggaagcaattgggcgtcaatgccaagcacggcctgtttcagaaaatcctgcgagaagttgggcacaaatttctctgtaccgtagtggtggtgaataccattggagaaccatacccttttgaggtaaacttccatattcttgaagtcgggagtagttttatctccctgatagttcgtatatactgcttcgagcatcctgcggattctcaaattatactttccattttgatcgaataagatgtcccgtccttccagagcagcctctgtcaggtagtaaatcagttctttttgtttcagcgtcagttcctcaaatccgggaaccttataacgtaatatctgtaagtctgcaaattgttccactgtataatcaaatttatctgcctcagcagttgttgttttggctcctccgcacgatgataaaagcgcagcggtcaccgccattgaaataagatgttttttcataatgctgatattgattcattaaaatgagaaaaggaattatctccaaaatctttcattcagaggtaattccttttggtcagtttcggaaagcgcaattactttttatcttccaaatgtcttttgcgataaccgttaggagtctcacctatgtttttgtaaaatgcagcgtaaaaagattgacgatttgcaaagccaaccatagcgctaatttcttccacatttttgtcggcataacgtttatccgtcaataaatgcaaagcatcttttactctgtattcatttaacagacaagaatagttcatgccaaagcgagagttaactactgcagaaagataacgagtattcgttttcaattctttcgccaaatcctttgctgaatagtcaggatccttgtactttttctgtacaacaatgatattcaatatcttgtcatacaactcatctgccaattccggtctgattaaagacctgtaagcagccttcttttctttcttttccctcaaattgtagggacgttttttaggagtttcctccgtttttttgttctctaaatcactcattgaattaactggttagggtttgttctttttgttaataattgctcatttgca

SEQ ID NO: 3096 - DNA, 14160 bp, Unknown
  gut microbiota DNA sequence
aaataaacaatcaaaaaccttgaaaaagagagatttggtttgattaataagaaactttaacctttatataattcatcttagaaactgaaatctatacataacgcaagttgtgaaagaaaaacgtacctttgcagcaaatttaaataatcgtcaatgagagaaactctaaaaacatatttcggttacgatagtttccgtcccttgcaagaagaaattatccgtcatattatgagcaggcaggatgcactggtattaatgcccaccggcggaggaaagtccatctgttaccaactgccggcactgctttgcgaaggcacggctgtcgtggtttctcccctcatttcactgatgaaggaccaggtggaagcattgcaggccaacggcattgccgccggagcgctgaacagcagcaacgatgaaacggaaaacgccaacctgcgccgcgcctgtatcgaaggccgcctgaaactgctttatatatcaccggaaaagttactggcagaaaaagactatctcctgcgggatatgcatatctcactgttcgctattgacgaggctcattgcatttcccaatggggacacgacttccgtccggaatatacgcaaatgggaatgctccaccaacaattcccgcaagtaccgatcgttgcattaaccgctactgcggataaaatcacccgcgaagacattgtccgccaactgcatctggttcacccccgtacctttatttcttctttcgaccggccgaacatcagcctgactgtcaaacgaggctttcaggcaaaagaaaagaacaaggcgattctggagtttatcaaccgacacagcggagaaagcgggattatttactgtatgagccggagcaaaacggagaccgtggcgcagatgttgcaaaagcagggaatccagtgcggagtctatcatgccggattgtccgcacagaaacgggacgagacacaggatgattttatcaatgaccgcattcaggtggtatgcgccacgattgcttttggtatgggaatcgacaaatcaaatgtgcgttgggtcattcattataatctgcccaaaagtatcgaaagtttttatcaggagatcgggcgtgccggacgtgatgggttgccgagcgacacggttctgttctattcgctgggcgacctgatcctactgaccaagtttgccacggaaagcaaccagcaaagcattaacctggaaaagctccaacggatgcaacagtacgcagaagccgatatctgccggagaagaatcttattgagctatttcggtgaaacggcgacggaggactgcggtaattgtgacgtctgcaagaaccctccgcaacggttcgacgggactgtcattgtacaaaaggcattgagcgccattgcacgcactgaacagcagatcggtacaggcgtattgattgacattcttcgtggaagttattcggcggaagtgaccggaaaagggtatcaggaactaaagactttcggtgccggacgggagattccaccacgcgactggcaggattacctgcttcaaatgctgcaactcggttatttcgaaattgcgtataatgagaacaatcatctcaaaattacgccaagcggaagcgatattttattcggaagaacaaaagccatgctcgtcgtcattcatcgtgaagaagtttcaacaagcaaagggaaaaagaaaaaaatagtggttacaaaagaactaccactcggtttgccggggacagaaagcgaagatctgtttgaagcgttgcgcggattaagaaagcagcttgccgaccaggaagcacttcccgcttacattgttctgtcagacaaagtattacatttgctttgtatttcccgccccaccaccattgaagaattcggttcgatcagtggtatcggtgaatacaaaaagaaaaaatacggaaaggacttcgtaaatctgattcggcagttcgtctgacaatccgttgaaaaaaatccatttcttgtcaagagcaagtttacatattattaacaaggaaggggaggaaacgaaaggacagtgaaggaatcagctcctctcatctgttctccccctcatcctcggggtgtataggcataagaaggaagacgagcaacggtctgcctaggggtaaaaggtaatgaggtgccttgtgaacggtttaaacagagcctctatttccggtaaacagagcctccgtttctataaaatagaggctctgataaggagaaacagaggctctatccggcagagtagaaacgggcagatacaaaaatagggaggcaatcgcccccctattctatctcaattaaaatcaaatgatatcttattattacttatacaaagatactatatccaaaagccaaagtcaagtttttaaggcattattttcatccgtttactttcaaaaggcatttggcataaactgcacattacttacattgctgaagttgttcgtgcagatcggcaggcggtacgcccaaagaaatagctttctcaaaatcggctttcgccagcgctttctttttctgcatcaggtaaatgttaccgcgcaacaaatatgcgtcagccaaagaagcattcaggcgaatagcttcttccaaatcgaccagtgccaggtcttcatgcttcatttcccgttccacatcggcgcgggcaacgtagagcgtagcgtcctccggagtctctacgatcatcttattcaggatgtcgagcgactcacggaatttctcctctttctgttccagagtagccagtccgaggcggccgctgtaactctgcgggtcaagttccagcaaacggttataatcaatccgtgcagcaggataatctctacggaggatgtagatataggcacgcatcagcaaagcctctttattctgcttgtcttcatcaagcactcggcaatagtcggtataagcacggtccgtccgccccgtttccatgtagatagcggcacggtcgagcagaatcgggactgccaacggagcgaagttcaatgcaaaagaataggattcgagtgccttgtcatactcgcccagacgacgctgcaccaagcccagattggaaaagagcaacgcatttttcgcattcttcggttccagtttcaatgcctggagcaacagttcttccgcccggtgaaaactgtccttctcaatacactctatcgctttctcggacaactgctgataggtttgcgcactcaacgcaaccggaaagcagaacagcaacgctataataattcttaccatacggttcaggtttaatgaataacttagtccaacggatacgcatcaaatgcgaacaactctgttgacaaataacgctctcccgtgtcaggtaacaacgctacgatttttttgttcttgaattcgggacgtcccgccaacaaacgggccgcatatactgccgctcccgaagaaatcccggcgagcaaaccttcggttgccgccaattcacgtcccgcacgaatcgcttcatcatcgggcacgcttattacttcgtccaccacagacgcatcataaagtttcggaataaaattggcaccaatcccctgaatacgatgcggagccgcctctcctccttccagaaccggagatgctgccggttccacggctacaatatgaattttcggattatgcttcttcaatgcacgggctacaccgcaaatcgttcctcccgtaccaactcccgccacaaaagccgcgacttcgccgtccgtatctttccatatttcctcgcctgtcgtccgttcgtgaacggcggcattggccggattctcgaattgctgtaaaatcaccgaaccgggaatactgtcacgcagttcctccgctttagcgatagacgctgccatgcctcccagtccgtccgtcaatacgatttgtgcaccgagtgccttcaacagattcctccgttccaggctcatcgtttcgggcatagtcaatatgagatgataaccttttatagtagacaccattgccagcccgacaccggtatttccacttgtgggttcgataatcgtcgcaccgggtttcagaactccgcgagcttcggcgtcttcaatcatcgaaagagccacccggtccttcacactccctgccggattgaatgcttccagcttggcgataatattttgttccataccatatttcccgcaataaccggaaagttccattagaggagtattacctaccagatcggttagtttctttactatctttgccattttattacattttatgtcacttgtacgacaaagatagagaaaaaaaggtatgttttatatcacatcatgagaaagataaggaaaagtatagtaactttgtatccgttcaatctttttaagtttacagatatgaaaaagagaatcatacaatttctcacgacttattttttgtttgtcctcttatttgcacttcagaaacctatcttcatggtttattaccgtgaattatatatcaacgcgtctctcggagactatttccgggtcatgtggcacggacttcccttggatttatcactggcgggatatctgaccgctattccgggcctgctgctcatcgcctccgcctggaccgattcatccgtgctccgccgtatccgccaagtctacttcggactgattgctttcatcatggcttgcatctttatcgtcgacctgggattgtacggcttttggggattccgcctggacgccactccgattttctatttcttctcctctcccaaggacgccatggcaagtgtcagcttttggttcgtactgctggggatagtagccatgctgatttacgccggtattttatactgcattttctactacgtactgatccgcgagaagaaccccatgaagataccttatcgccggcaaaatgtctccctcgcattattattactgacggcagcgcttttcatccctatccgcggcggtttcaccgtatcgaccatgaacttaagcaaagtatatttcagctccgaccaactgatgaaccatgccgccattaatccggcattcagtttcatgtactctgctacgcatcagaataacttcgagaagcagtatcgtttcatggaccctaacacagccgacaagctatttgcggaaatggtggacaaacccgccacaccggccgacagtatcccgcaactcctgaatacccaacgcccgaatatcgtctttatcattcttgaaagtttctccacacacctgatggaaactttcggtgggcagccgaatgtagctgtcaatatggataaatttgccaaagaaggtatcttattcagtaacttctatgccaacagcttccgtaccgaccgtggtctggcgtctatcatcagcggatatcccggacagccgagcaccagcattatgaaatatcccgaaaagacggacaaacttccttcgatcccgcgcagcttgaaaaacgccggatacaaccttgaatattattacggcggagatgcggactttacgaatatgcgctcttacctggtatcttccggtatcggaaagattatttgcgacaaggatttccctttgtccgaacgtaccggcaagtggggggcacaagaccacgtattattccagcgtctgctgaaagacatgaaagaggaaaagcaacaggaaccgttcctgaaacttgtccagacttcaagcagccacgaaccttttgaagttccgtttcaccggctggatgacaaggttctcaatgcattcgcttatgccgacagttgcgtaggcgacttcatcaaacaataccaggaactcccacagtggaaaaatacagtatttgtactcgttcccgatcatcaaggagcctatccatatccgatcgagaatccactggacggacaaacaatccctcttattttaattggaggcgcgataaaggaaccgcatgtgatagatacttatgcctcgcagattgacattgccgccaccctgctttcacaactgggactgccacacgatgaatttactttcagcaaggatatcctgaatccgtcatctcctcatttcggatatttcacccgcccgaactacttcggtatggtgactcccgaaaatcaattggtatataatttggatgccaacaccgtacaacttgacgaaggaacggagaaaggagcaaatttggaaaagggaaaagctttcttgcaaaagctctatgacgacctggccaaacgttagaataacagaaatacagattatttattaagcggtatagaacaatatcttcttctttattgtatatttgcaacattcaaaaatataacaataaagactgatgataaataccgaaattatcaatttcctttcggaagtggacaccaatgtcttcctgttcttcaacggcatacattcccccttttgggactattttatgagtgctttcacggggaaaattatatgggtaccgatgtacgctaccatattatacatattgctaatcaatttccattggaaggtagtcctgtgctatgtggctgcgatcgcgcttaccataacctttgccgaccagatgtgcagcagtatcatccgtccggtcgtggcacgtctgcgtcctgccaatccggaaaatccgattgtagacctggtgcatatcgtaaacggctatcgcggaggaagttacggttttccttcctgtcatgccgccaactctttcggccttgccatgtatgtagtattcctgttccgtaaacgctggttaagtgttttcatcataacctgggcagttctcaattgttacacgcgcatatacttgggcgtacattaccccggagacttaattgtaggaggcatcatcggagggttcggcggctggctgttctgtacgattgcccataaaatagcttcttacctgcaaaagccttcccgtgtaagaagaaatactatcagacaaacatcggtcactatgtatgtaggcttcctgacagtactcggcatcattatttactctacaatcaaaagctggtagaaacaaaaaacaatccgaaatatataaagaaaagcctgacaaccgggaaaagttgtcaggctttcttatatgaaggggttacccgataaagggatattaccgcctgatacaattattctttttatcaagcttttctaatgtaatctacaatccattgtcccacttctttggttccgtatttggcaccaccggcaacttggatttcaggtgtacgtacattctcgtccagagaagcgtctactgctttacgaatcaacgctccttcttctttaaggtcgaaatactcgaacaacatagctacggaaagaatctgtgccaacggattagcaatattcagccctttagcctgcggccatgaaccgtgaatcggttcgaacaccggagtactttcccctgtagaggccgacggaagtaatcccatagaaccactgattacagaaccttcatcggtcagaatatcaccgaatgtattttccgttaccattacgtcaaagaaagccggctcctgaatcatcttcatcgcagcattatccacaaacatataatcagtcgtcacttccggatactgaggggccatttcctgtgcaatctgacgccacaggcgggaagaagcaaggacattcgccttatctaccacggtcaagtgttttctgcgcttcattgcatattcgaaagctactttcaggatacgttcgatttccggacgggtataatagttagtgtcataggccttgtcgttatcctgatatttctcgccgaagtacatacctccggtcagttcgcggatacagatgaaatctgcattttctaccagttccgcacgcaacggtgatttgtgaatcaagcatttgaatgtctgtacgggacggatgttagcgaaaagtcccaacttcttacgcattgccagtaatccctgttccggacggactttggcagtaggatcattgtcaaacttcgggtcgccgacagcagagaacaagactgcatccgcgttcttacaagcctgatatgtttcttccggaaacggatctcctacctcgtcaatggcattcgcgccacagattgcatattcgtaacttactttgtgaccaaacttctcgcaaacggcactcatcacctctacaccttgcacagagatctccggtccgataccgtcgcctgctaatacagcaattttaaaatccataatcgttaattcttctatttatatatacttataaaacattcttcggacaagctgattctcagctactctttctcatattcatcttcaatgatattcagcattttcacggttgccttaatggcagcctcggtctggtccgcatccagtccgcgcgtacggaaagcacagtcctcataactccacatgattactgtctgtacaaaagcgtccgtgcgtccgcccggaggaattgttaccgtataattggtcagcatcgggaatttacgtcccagtgtcaccttatatatcttacgcaaagcacgcacaaatgcatcatactgaccgtcaccgctcgaactttcctcgtactccttgccattgatttctattttcagcgtcgccattggtttcaagccatgagccagattgacaaagtaacttttcagtctgaccttctcacctatcgcaccatgcttcaacacatcggaaacgatatacggcaaatcttcctgggtcaccaattctttcttatcccccaattcgatgatacgctccgtcaccttacgcatagagtcctcgtccagttccagaccgaggtcctccagattcttacggatgttcgccttgccgctggtctttcctaacgcatactcccgctttcttccgaaccgttcgggcaacaggtcattgcaatacaggttattcttattatcaccgtcagcatgaactccggcaacctgcgtaaagacattctcccccacaatcggcttattggcaggaatgacaatacccgaatatgattctaccacccgactgacatcattcaggcggctctcatcaatattggtcactgcattgaagtggtctttcagaatagcctgcacacttgaaagaggagcattacccgcgcgttcgcctagtccgttgatcgttgtgtgcaatcctttggcaccgctcaacacggcagccagcacattgctcaccgccagatcatagtcattgtgggcatggaaatcgaagtgcatattcggataatgcttcttcatcttccgcatatattcaattacttgcaacggattcaggatacccaaagtgtcaggcagcatataacgtttgatactggtatgcttcaatccctccatgagttgaaatacatattcgggagagtccttcattccgttgctccaatcctccagatagacattgacagcaatatcctgttcatcggcatagcgcaccacattgatgatatcctcaatatgttcttcgggacttttcttcaattgctgcgtacagtgtttcagcgaacctttgcaaagcaggttgatgacgcggcaaccggtatgctgtatccagtccaccgaagtatggccgtctacaaatcccagcacttccactttatgaagcagattgcggcgggctgcccagtcgcagatcatcttcacggcttcaaactcaccgtccgacacacgcgccgaagcaacctctacccggtctacttttaaatcctccaacagcaaacgggcaatcattagtttttcatgaggcacaaaagatactccgctggtctgttcaccgtcacggagcgttgtgtccatgatctctattttgacgccttgttttcccattcttcgattttatttttattgcttagcaagaaatctatatcatccagtccgttcatcagacaaagtttcttataagcgttgatttcaaaatgttcactcttgcctgtagccttgttagtaatggtctgttcgggaagattcacctccacttccattttcgggtcagcatagatagagtcgaacaattcctgaagaaatccttctgtaacgactaccggaagcacgaagttattcaactcgttattcttgtgaatatctgcaaagaaactggagactaccacccggaaaccataacccgcaatagcccaggcagcatgctcgcggctcgaaccggaaccgaagttcttccctgccaccaacacctgtcccccataagtaggattgttcagcacaaattcttcattcagtgaaccgtcggcattataacgccagtcacgaaacagattatcgccgaagaacttttcttcacgagtcgttgctttcaggaaacgggccggaataatctggtcagtatctacattttctaaagggagaggtacacaagtacttgttattatattaaattttgtcttagccatctttgtctactattttaagatttgcaatttctcgattgtcaattacattaattctctcggatcggtaatcacccctgtcaccgctgcggcagcagctaccagcggactggcaagcaaagtgcgtgcaccgggtccctgacgcccttcaaagttacggttactggtagatacggaatattttccggcaggaatcttatcatcattcatcgccagacaagcagaacatcccggttggcggattgcaaaaccggcttccgtcaatatcttgtctattccttccttccgaatctgcgcatctaccatccatgaacccggaaccagccatgctatcacgttttccgctttcttacgtcctttcacaatagaggcaaacgcacggaaatcttcgatacggccgtttgtacaagcaccgaggaacacataatcaatcttcttgcccaacaaagattcgcccggttgaaagcccatataatccagtgacttcttgaaagaaacctgtgctgtttcactcattccttcagtagtaggaatatgccgggtgatccccatacccattcccggattcgttccgtaggtaatcatcggttcaatatcagctgcatcgaaacgcacttctttgtcaaatacggcatcatcatcgctcttcaacgtcttccaatattccaaagctttgtcccacgcctccccttgcggagcactttcacgccccttgatatattcaaaagtcacttcgtccggagccaccataccaccacgtgcacccatttcgatagaaaggttacagagagtaaggcgtccttccatagtcagattacggatagccgagccggcatattctacaaagtatccggtagcaccgcttgtagtcatcttagacatcatataaagcgccacatcttttgcagtcactcctttgcccagttcaccgtccactgtgatacgcattgttttcggccgcgactggagaatacattgcgatgctagcaccatttccacctcactggttccgataccgaaagcgattgctcccatagcaccgtgagtagaagtgtgtgaatcaccgcacacgattgtcattcccggcaaagtcaagccacgttcgggacctactacgtgaataataccattctttggatgcatcatgccaaaatgcgtcaatccgaaatccttggcatttttcgtaagtgtatcaacctgtgtcttggaaaccggatcttcaatcgacttgtcctgatcatgtgtcggtgtattatggtcgggcatacagaataccttttccggacgcaacactttgatcccacgttcacgcagtcctgcaaaagcctggggactggtcacttcatggcaatataaccgatctatataaagctgtgtcgggccgtcttccacagtagtcaccacatgggcgtcccatatcttatcaaataatgtattcatctgtctatttactattttactaattactatttacaaatttagtcaatccctgtaatgctgagatatgacctcagtctctatcttatgatttgaacttgttgatacagtcaatataggcttctaccgaagcggcgataatatccgtattagctccgaaaccataatatatctggttatcgtattccacctgcatgtgaactttacctacgtcatcacttcccttgctgatagcctgaatagtaaattctttcagtgtcatgtggcggtcaacaatcttcttcaatgctttgatagcagcgtccaccggaccattaccactggcacaagcttcaaacttctcaccggagatattcaatccgagactggctaccgaacgtacaccgacaccacttgtcacctgcaaataatccaacttgatgcgatgattcacactgcggtcggcacctgccaataccagtatatcatcgtcgttgatatctttcttcttatcagccagtttcaggaattcttcgtaaaccttatccagcttatcctgttccaaattaacacccaagatattcaggcggttcttcaatgcagcacgtccgctacgggcagtcaatacgatagagttatcatcgatacccacatcgtgcggatcaataatctcataggtctgtacattcttcaagacaccgtcctgatggataccggaagagtgtgcaaaagcattccgtccgacaatcgccttattcggctgtaccggcatattcatcaaactggataccatgcggcttgtcggataaatcttctgggtattgatatttgtctggatatcgatttcgtgatgactcttgataatcatagcgatttcttcgagtgcagtgttaccggcacgttcaccgataccgttaattgtaacttccacctgacgggcgccgttcaagacacctgctatagtgtttgcagttgccatacccaaatcgttgtggcaatgagtagagataattgcattatcaataccgtctacatggtcaatcaggtatttaatcttggcaccatattcagaaggcaaacagtaaccggtcgtatccggaatgttcaccaccgtagcaccggctttaataacagcttctaccacacgtgccagatattcattatccgtacggcctgcatcttctgcataaaattccacatcatccacaaaacgacgcgcatattttacagcagctaccgcacgttcgataatttcttcacggttcgaattgaatttgtatttgatatgcgaatcagaagttccgatacctgtatgaatccgtttgtgcttagcaaacttcaatgcgtctacagctacatcaatatccttttgaacagcacgggtcaaggcacaaatagtaggccaggtcaccgctttagaaatctcaatcacagaattaaaatcacccggacttgaaattgggaatcctgcttcaatcacgtctactcccaaagcttccaatgccttcgcaacttgaatcttttctactgtattcaactgacatcccggaacctgttcaccatcgcgaagggtggtatcaaaaataaataacctattgtccatcttctatttatattatataattattagcattaaaaaagcctttcacacatggaagtgagaaaggctttcgtatatcttcattatacacatttacgcgtagcactcacttccactaacccttgatagtagaataataataccgcatagtagaatatgtataaacatctgattcatcttttgtctcttttattagtttgacggtgcaaaggtatagataatttctttaccaccaaataatacgttacttttttatcataaaaaacttcatttcataagttaaaggcaaattttataaataatgtatcacttatagaggtaagttccattaaacagaaaaagggaacgtcgtatcttatacacttcgtcccctctttcgttatcgttctaagtcaatagattacttcttattgcagcattctttcttttctgcacagtctgctttcttgtcgcaagcagtagcgcaagaatctttagcctggcagcaagaatcagcttcttcaacaacggcagcagcttctactgtttctacagttgtttcttcgccttcagtagcagcattattagttttgttacctgcacaagacatcattgcaaaggaaaatgttactgcaacagcagctaaaaatagtttcgttttcatactctttaaatttgctttaaacgttgaataaaataattgtcggtgacaaatatagcataaatttcccagactaccaaaacagatgaagcccctccggtatttctactgaaggggcttcataaaaaacggcggctacctactctcccactgttacgc

SEQ ID NO: 3097 - DNA, 545 bp, Unknown
  gut microbiota DNA sequence
agggatgtaacaattacttgtataagatttattttcagtttatctttgggaaaactttgatacacctctgaatatgagaaaaagacttgaagaatcgtttctattttttttatttactataattatttgcttgcttttatttaattgcaatgagcatatatacaagatatatagtaatcagtcgtttgaagatatttgctctattgcatataaaaatgaaaaggcattttgtatagtcttagtagattctactcaagagttgtctcgaaggtattgtctaaacttgaagaataaaggttttgtagatacaagcaaagctatttataatattgcagatgttaacgtttcttcaaatgcttggtatatgaaatggctttgtcctctatcactacctttgacatgtgtgttttcagatactgggacactcattgatttaattcctggagcaactaaagaaacttttttatatacaaccgaggcgatttctgatatgaaaataactaattatcattatcctaaccgctttaaaattcctaaatataatg

SEQ ID NO: 3098 - DNA, 124611 bp, Unknown
  gut microbiota DNA sequence
tttttattctccttttgattttatatatttgctttctcccgtgagaatttcggaaaagtgtcatttagtaataagaatacgctgaaaacggaataaaatcggtgtagaagtgtgatttttttgcaagggaatatttttcttttcatctttcccttttttatcaaattgatttttgtaaatttggcgagaatctgatgaaggaacataattaatacagtaataatactaaatactcctgttaatatggaaaacaaaattcaagagttgaccgataagatttatcgtgaaggcgtggaaaaaggaaacgaggaagcgcaaagacttatcgcgaatgctcaggaagaagcaaaaaagatcattgaggatgctcacaaagaagctgactcaatcgttgctgcctctcgtaaatctgctgaagaactggcagaaaatacaaaatcagagttaaaactattttccggtcaggccgttaatgcactcaaatcagagattgctactatggtcactgacaagttgattaccgcttctgtaaaggatttcgctcaggataaagattacctgaatgcgtttattgttgcattagcttctaagtggagtatagacgagcctatcgttatctcgacagctgatgcggaatcattgaaaaaatattttgcagctcatgcaaaagctttattggataaaggtgttactatccagcaagtaaacggtatcaagaccttgtttacggtttctccggcggacggttcatataaagtgaacttcggagaagaagaattcatgaattacttcaaagcgttcttgcgtcctcaattagtagaaatgctattttaaaagaagcgactatgagtagtaagtactattacttggtagcaggtttgccggaactttcactggaagacagcaaactgagctatacagtagccgattttaaaactgaaatctacccgggattatctgcttcagaccagaagttgattgacttattctatctgaagtttgacaatgccaatgtgctgaaacttctcaaagacaaagaggcggaaattgataaacgaggaaactattctgctgccgaactcactgagtatatttctatgttgagggaaggcggagaaatcagccctaaggaatttccggtttacctttctacatttataactgattatttgaatactccggccgaaagtacggtgttgcatgaagatcacctggctactttatattatgagtatgccatgaaatgtggaaataagtttgttgctgcctggtttgaattcaatttgaacatcaataatattctggttgcatttacgagccgtaagttcaaatgggatattgcttccaatattgtaggtaatacggaagtgtgcgaagcattgcgtacctccagtgcccgcgatttcgaattgtctggtgaggttgatgtttttgagtcattggtgaaaatcagtgagattacagaactggtagaacgtgagaagaagctggacgctttacggtggaactggatggaagatgctattttcttcgattatttcactgttgagcgcatttttgctttcttgttgaaactggaaatgattgagcgttggatctccttggataaagaaagaggtaatcagttgttccgaagcattattgagtcgctgaagaacgatgtacagattcctgcagaattcagataataaatttaaagaaatatatggcaacaaaaggaactgttagtggcgttattgccaacatggtgaccctcgtcgttgacggaccggtagctcagaatgagatttgttatatctctaccggtggcgataagttaatggcggaggtgattaaggttgtaggttcacaggtatatgttcaggtgttcgagagtacacgtggactgaaagtgggcgccgaagccgaatttacaggacacatgcttgaggtgacattaggcccgggtatgttatcgaaaaactacgacggtctgcaaaatgaccttgacaagatggacggggtttttctgaagagaggacaatatacgtatccgttggataaagaacgtgtatggcacttcgttccattggtaaacgcgggtgataaagtacaagcttccgcgtggctggggcaggtggatgagaacttccagccgttgaaaatgatggcgccgtttacattgcagggaactgctactgtaaagactatcatgccggaaggtgattataagattgaggatacgattgctatcctgactgatgaggaaggaaatgatattcctgtgactatgattcagaggtggcctgtgaaacgtgccatgacgaattacaaggagaaaccgcgtcctttcaaactgttggaaaccggtgtgcgtgtgattgatacgctgaatccgattgtggaaggtggtaccggctttataccggggccgttcggtacagggaagacggtgcttcagcatgctatttccaaacaagcggaagctgacatcgtaattatcgccgcttgcggtgaacgtgcgaacgaggttgtggagatctttaccgaattcccagaactggtggacccgcacacgggacgtaaacttatggaacgtacgatcattatcgccaatacttctaatatgccggttgctgcccgtgaagcatctgtatatacagcaatgacattggcagaatattatcgttctatgggactgaaagtgttgttaatggcggattctacttcacgttgggcgcaggcgttgcgtgagatgtccaaccgtatggaagagttgcccggaccagatgctttcccgatggatatttcggctattatctcaaacttctatggccgtgccggttatgtgaaactttctaatggtgaaacgggctcaattacttttatcggtacggtatctcctgccggtggtaacttgaaagagccggtaactgaaaacacgaagaaagtggcccgttgtttctacgctttggagcaggaccgtgctgataagaaacgttatccggctgtgaacccgattgattcttattctaaatatatcgaatatccggaatttgaagaatatatcaaaggtcatatcaatgatgaatggattggtaaggtgaatgaactcaaaacccgtttgcaacgtggtaaggagattgccgaacagattaatatccttggtgacgacggtgtgccggtagaatatcacgttactttctggaaatcggaattgatcgactttgttatcttgcagcaggatgcattcgatgaaatcgatgccgtaacacctatggaacgtcaggaggatatcttgaatatggtgattgacatctgtcatacggagtttgaatttgataacttcaacgaagtaatggattacttcaagaagatgattaatatctgtaagcagatgaactactcgaagttcaaatcagagcagtatgagggattccaacagcaattgaaggaattgattgccgaaagaagtattaaacagtaatttgtaaatagctaaattgtaaatatataaatggcaacaaaagcttttcaaaagatatataccaagattactcagattactaaggctacctgttcgttgaaagcaacgggagtagggtatgatgagcttgccactgtggatggtaaactggcacaggtggttaagattgctggtgacgatgtcactttgcaggtatttgaaggtacagagggtattcctaccaatgctgaagtcgtatttctcggcaaatctcctacattaaaggttagtgagcagttggcaggacgtttcttcaatgcttttggtgacccgattgacggtggtcccgagattgaaggacaggaagtggaaatcggtggtccgtcagtgaatccggttcggcgcaaacaaccgtcggaactgattgcgacaggtattgccggtatcgacttgaataatacgctggtgtccggtcagaagattccattttttgctgaccccgaccagcctttcaaccaagtaatggcaaatgtggcattgcgtgctgaaacagataagattattctgggcggtatgggtatgacgaatgacgactacttgtactttaagaatgtgttctccaatgctggtgctcttgaccgtattgtgagtttcatgaatacgaccgagaatcctccggtggaacgtttgttgattccggatatggcgttgactgctgctgaatattttgcagtaaataataatgagaaggtgttggtgttgttgactgatatgaccagctacgccgatgcgttggcaattgtatctaaccgtatggaccagattccttcaaaagactctatgccgggttcgatttattccgatttggcgaagatttacgagaaggcggtgcagttcccttctggtggttctattacgattattgcggtgactactttgtccggtggcgatattacgcacgctgtgcctgataatacaggttatatcacggaaggccagttgttcctgcgtcgtgatagtgatattggtaaggtaattgtcgatccgttccgttcattgtctcgtttgaaacagttggtaaccggtaaaaagacacgtaaggaccacccgcaggtgatgaatgctgctgtacgtctgtatgccgatgctgctaatgcgaagaccaaaatggaaaacggtttcgacctgacgaactacgacgaacgtacgttggctttcgcgaaagactattccaaccagttgttggccattgatgtcaatcttgatacgactgaaatgttagacgtagcttggggcttgttcggcagatacttccgtccggaagaagtaaatattaagaaagacctggtagatcaatactggccgaaaggtgaataattagcactagtaataactgataattagtaataacaacgtggctataaagtttcaatataacaaaacctcccttcagcagctcgaaaagcaactgaaagtgcgggtacgtacgcttcctattatcaagaataaggaaagtgccctccgcatggaagtgaagcgctgtaaaacggaagctgccgatttggaggataggctcgaacaacaaattcaagcctatgaagccatgttcgccctttggaatgagtttgacgcttcattgataaaggtgaatgatgttcatcttggcgtgaagaagattgcgggtgtacgtgtaccgctactcgaaaatatagatttcgagatacgtccgtacagtatgttcaacgctcccaagtggtatgccgacggtatccatttgttggaagaactggcccatacggcaatcgaacgcgagtttatgctcgccaagctgaatctgttagaacatgcaaggaaaaagaccactcagaaagtgaacctttttgagaaggtgcagataccaggctatcaggatgcattgcgaaagatcaaacgatttatggaagatgaagaaaacctgtcgaagtcttcgcaaaagatcatgaagtctcatcaagaaaaaaggaaggaggtagaagcatgattacaaaaatgaagaaactcacattcctggtttatcacaaggagtacgaagaattcctgaacagtctgcgcgaacttggtgtggttcacattgtggagaagcaacaaggtgctgccgataatacggagttgcaggagaatattcgccttttcaaccgcttggcggctactctgaagttgcttcaaaatcagaagcatgaaaagaatgccgtgattgctacggaaggtggaacggctacccgcggtatgcaagtactggacgaggtggatgctctgcagacggaacacggcaagttgtcccaacagctacaaagctatgcgaaagagaaagaagtattggaagtttggggtaactttgagccgaccggcattcagaaactgaaagacgccggttatataatcggtttctatagctgttcggaaggaaattacaaagaagaatgggaaacggaatacaatgcaatgattgtgaaccgtatttcttccaaagtattctttgtgactgtaacgaaggccggacaggaagtggacttggatgtggagcaggcgaaacttcctgcatactctctgtcacgtcttgaagcgctttatgatacgaccgaacaggcaatcgaagggaatgaaaagaaactcgttgcactttccgagacggatattccttctttgaaggcagctttgaaagagttacagagtcagattgaattctctaaggttgtattgagttccgaacaaactgccggtgataagctgatgttgattgaaggatgggctcccgcatacagtaaagtggaaatagaggcttatctgaatgacgcacatgtatattatgagattacggatccgatgccgggtgataatgttcctattcgattgaataataaaggattctttgcctggttcgaaccgatctgtaagctgtatatgcttccgaagtataatgaactggacttgactccgttctttgccccgttctttatggtatttttcggactctgtctgggagactcgggatatggacttttcttgttcctcggagcaacggcatatcgcttactggcaaagaaggtaactccgtcaatgaagtcgattatttcactgatacaggtactgtctgcttcaaccttcttctgcggtttgctgacgggtacattcttcggagcgaatatctatgatttggattggcctatcgtgcaacgtctgaaacatgcggtcctgatggacaacaacgatatgttccggctgtcgctgattttgggtgttatccagattctgttcggtatggtactgaaagctgtgaatcagacaatccagtttggtttcaaatatgcaatagcaacgatcggatggattatcctactggtttcaacggctgtttcggctttattctcttcttcggagttgttgtcgatgggaggtacggcatataaggttgttctgtgtatttccggtgctatgatattccttttcaacactccgggaaagaacatatttatgaatatcggactcggtttgtgggattcatataacatggttaccggtctgctgggagatgttttatcatacgttcgtctttttgcccttggactttcaggaggtattctggcgggagtattcaacagtctggcggtaggtatgagtccggataatgtaatagcaggacctattgtaatggtgctgatttttgttatcggtcatgcaatcaatatgtttatgaatgtgctcggtgcaatggttcacccgatgcgtctgacgttcgttgagtttttcaagaactccggttatgaaggtggcggcaaagagtacaagccttttaaaaattaagaattaaagaattaaacaataaaaaatagaataagattatggaaatgaatttgtttattgcctatattggcatcgcggttatggttggtttgtcaggcattggtagtgcttacggagtaactattgcaggtaacgctgctatcggcgcattgaagaagaatgatagtgcattcggtaacttccttgtgttgactgcacttccgggtacacagggtttgtatggttttgccggttactttatgttccagaccattttcggcatcctgactcctgaaattactgctattcaggcttcagccgttcttggtgcaggtattgctttgggattggttgcgttgttctctgctattcgtcagggacaggtttgtgcaaacggtatcgctgctatcggccagggacacaatgtttttagtaatacattgattttggccgtattcccagaactttatgctatcgttgctttagctgcaactttcttgatcggtagtgcgcttgcataatttttttctgcaagaaactttttcaataaagaactttcaatccccttgtgaatgccgttttgcatttgcaaggggatgttcttttttctttgtcaaccaacttttctttcttcttattaactcatatttttcgcataaagtattatttttcaaagaataatgtgtacttttgcactcgcatactaaaaagagttttaatatattatatggtaaaagatttattaacccccgattatatcttcgagtccagctgggaagtatgtaataaagtgggagggatatacactgtcttgtcgacacgggcgaatacattgcaggaaaagtttcgcgacagaatttttttcataggtcctgatgtgtggcaaggaaaagagaaccctctattcattgagtcagataatttgtgtgctgcctggaaaaagcatgcatttgagaaagacgaactttcggttcgtgtcggacgatggaatataccaggtgagccgattgtcattctagtcgattttcaacctttttttgagaagaaggacgatatatacacagatatgtggaatcgttttcaagtagattcgttgcatgcttatggcgattacgacgaagcttctatgttttcgtatgctgcaggaaaggtggtggaaagtttctaccgctacaacctgacagaaacggataaggtggtatatcaggcacatgagtggatgaccggaatgggagcactttatatacaggaggctgtgccggaaattggtactattttcacgactcatgcaacatcgatcggccgttccatagcaggtaacaataagccgctgtatgactatctgtttgcttataatggtgaccaaatggcacaggaacttaatatgcagtcaaagcattctatcgagaagcagactgcacattatgtagactgcttcacaactgtaagccagattaccaacaatgagtgcaaggaactgttagacaaaccggcagatgtagtgttgatgaatggttttgaagacgatttcgtaccgaaaggaagtacatttacgggaaaacgtaaacgtgcacgtgccttgatgctaaacgttgccaataaattattgggaacaaatatgggggatgatacgttaatcatcggaaccagtgggcgttatgaattcaaaaataaaggtattgatgtattcttggaatcattgaaccgcttgaacagggacaaaaacttgcataagaatgttctggcattcatcaatgtccccagttgggtaggagatccccgtgaagatttgcaggaacgtttgaagagtaaagagaagtttgatactccgctcgaggtgccgtttatcactcattggttgcataacatgactcatgaccaggtgttggatatgctgaaatatctgggaatgggtaatcgtcccggagataaggtaaaggtgatatttgttccttgctatctggacgggcgtgacggtattatgaacaaagaatattatgatatattgctgggacaggacttgagtgtctatgcttcttattacgaaccatggggatatactccgctggagagtgtagccttccacgttccaacaataactactgatctggcgggattcgggctttgggtaaatagcttgaagaatcagcatggtatcaatgacggggtagaagtgctgcaccgttctgactataattattcggaggtggcggatggtatcaaagatacaattacgctatttgcggataagtcggaaaaagaaataaaagaaatccgcaagcgggctgctgaagtggcggaacaggctctgtggaaacattttatacaatattactatgaggcttacgatattgctttgtgcaatgcgatgaagcgtcagttgagttaagaaaaaattattcatcaataagtaaataagaacattatgaaaattaaagttagtaatgtgaatactcccaactggaaagaggttactgtaaaatcacgtataccggtagagttggagagattgtctgaaattgcacgtaacatttggtgggcatggaattttgaagcgacagaattgtttagagatctagatccggaactttggaaagaatgtggacagaatcccgtactgttgttggagcgcatgagctacgaaaagttggaggctttggcaaaagacaaggtgattctgagaagaatgaatgatgtttatacaaaattcagagattacatggatgtgaaatcggatgaaaaacgtccgtcagtagcctatttcagcatggaatatggtttaagtagcgtcctgaaaatatattccggtggtctgggtgtgttggccggtgactatttgaaagaagcatctgatagcaatgttgatctttgcgcagtaggtttcttgtatcgttatggttactttacgcagactttgtctatggacggtcagcagattgctaactatgaagcacagaacttcggtcaacttcctatcgaacgtgtaatggatgcagcaggcaatcctttagtggtagacgttccttatttggattattatgttcatgctaacgtatggcgtgtaaatgtaggacgtatttctttgtatctgcttgatacggataatgaaatgaacagcgagttcgaccgtcctattactcaccagctttatggcggtgattgggaaaaccgtttgaagcaggaaatcctgttgggtatcggtggtatcctgactctgaaagcactgggtatcaagaaagatgtctatcactgtaatgagggacatgctgcactgattaatgttcagcgtatctgtgactatgtagctacgggattgacattcgatcaggctatcgagttggttcgtgcttcttctctttatactgttcatactccggttccggcaggtcacgactattttgatgaaggactgtttggtaaatatatgggaggttatcctgccagaatgggtattagctgggacgacctgatggatctcggacgtaataatccgggtgacaagggtgaacgtttctgtatgtctgtttttgcttgcaacacttctcaggaagtgaacggtgtgagctggctccacggaaaagtttctcaagaaatgttctccactatttggaaggggtatttcccggaagaaatgcacgtaggttatgttactaacggtgttcacttcccgacttggagtgcaacagaatggaaacaactgtactttaaatatttcaacgaaaacttctggtttgaccagtctaatcctaagatttgggaagctatctataacgtgcccgatgaagaaatctggaagactcgtatgacgatgaagaataagctggttgattatatccgcaaatcattccgtgatacatggctgaagaaccagggagatccttcacgtatcgtttcgttgatggataagattaatccgaatgcgttgttgattggcttcggtcgtcgtttcgcaacttacaaacgtgcgcacttgctatttaccgatttggaacgtctttccaagatcgtaaacaatcctgattatccggtgcagttcctgtttacaggtaaggctcacccgcatgatggtgcagggcaaggtttgattaagcgtattatcgagatttcacgtcgtcccgaatttctgggtaagatcatcttcctcgaaaactacgatatgcagttggctcgtcgtctggtttccggtgttgatatctggttgaatactccgactcgtccattggaagcatccggtacatcaggtgaaaaagcattgatgaacggtgttgttaacttctctgtattagatggttggtggctggaaggttatcgcgaaggtgcaggttgggcgttaactgaaaaacgtacttaccaaaatcaggaacatcaggatcaattagatgctgctactatttacagtattcttgaaactgaaattcttccgttgtactatgctcgcaataagaaaggatattcggaaggctggattaaggtagtgaagaattctatcgctcagattgctccccattatacaatgaaacgtcaattggatgactactattcgaagttctacaataagttggctaaacgtttcgctattttgtctgctaacgacaatgcaaaagcgaaagaaattgctgcttggaaagaagaagtggttactaaatgggattctattgaaatcgtatcttgcgataaggtggaagagctgaaaaccggcgatatcgaaagcggaaaagaatatgtcattacttatgtaattgacgaaaaaggtctgaatgatgccgtaggacttgaattggttactacttatacgactgccgacggtaaacaacatgtttattcggtagagccgttcagtgtaattaagaaagaaggtgacttgtatacattccaggtggtacatagtttatcgaatgccggtagctttaaggtatcttaccgtatgttcccgaagaacccggatcttccgcatcgtcaggacttctgttatgtacgttggttcgtctaattgattgagaataagatagggtagagtgatcttcctctattgcttctctctataaaaaaagaggctgtctcaaaataaacttgagatggtctttttttgttttatttcagattgaagttattttggattcttctcaaaaaaaggagtttacaagcttctttttgaagatttcattctttcaaatagtttttttcgttgccataagcctcctaagaggctacttttgcaagattgtgtgctatgaccagcaggccgaactcaatttccaccttcttaagtccacgaaggtgaaacctcttgaagtgcttgttgttcttggggtttccaaatacggcttctacatcctgtggccgctgactgcggtatttaagaccttccggtgacaggagcttttcacgttccctttccttgatttttctcaggcggtgattcacctgtactatcctttctgaccggcttctgtgacaccggcatcttaacgggcaggcgttacagttacatgccctgtatcttgatatagtctgcacaaaaacgttgtctgttacccgctttgcatcggagagtctttccattctctgtcccatcggatagtacatgccgtcggtttcttcattataataaaagttggcagacaagaacggatcgtttttgaagcttcttttctgctccttatgaaaataattgtactttataaaggtttcaatgccatgtttgaaagcgtacagataattctcttcgcttccgtatccggcatcacagacagacacgtcagggtatctgccgtaaagtgaatggaaatcatccatgtgcagaggataagtggaggtatcacctgcacactggtggagggtatagttcaggatgaactgtttattggtactgatctggggattgtatccgggtttaagctgtccgttcttcatgtagtcctctttcatacgcatgaaagtggcatcattgtcagtctttgaataactgttacgtccgtcaagtatctttccctgtgattcgtatttcctcaactgttcaggccatgacttccttacacgtcttaccttcactttcatcttcttgtcagcatccactccattcagggcatcatctatctgctcgagtgccttttccactttctcaggggtgatatcctgatatgtgaccggagcggaatcacgcagttcctgtttggtgagggattctgcacaattccatatatcttcaagctattctgctattttagatatacgggtatgtatggacttgccccagacaaaagtgtaacggttggcgtttgcctccatttttgttccatcagtgaaagctacatccagacttacaaacccttccgccacgaggaactttacaatggtggcgaaaactgtcttcagcacatccttcagacgactgctgtggaaacagttgatggtgttatgatcaggagtcacattgccggtaagccacatgaaacggatgtcattgcggcagaactcttctatgcgacggctggaatagatattacgcaaataagcatagacaagaatctgaaacatcatgcgtgggtggtacgcagaacagcctttagtggaatacttacggtaaagttcttcaaggtttatctgttcaatgatacggtgaacaacccggaccggatcgttccgggggataaaatcgcctaaacatggaggtaaaagcagattatcgttggatgtgtaacctttaaacattatctttgggatatcttgacttgactccctaagatacaaaaaattagggagacgggcaagttctggctgagagaagttagggcttgccccatttttttgcaggcacaaaaaaggccgtctcaaatttcattttgagacagcccttatttatttaaagtcggagactgtctttgctgaggaacgacaggcttttttattattttacggcttctgctattttagtttgaagttcttctccgtgcaggcctcgagcgatgattgtaccgtcaccgtcgatcaataccgtgtgaggaatactgtttacggcgtaaagttgtgcgccttcactttgccagaatttcaggtcggacatttgtggccaagtcatgttcagtttattgatcgcttctttccaggcagcaccgtcctgatcgagagatacacctacgatttcgaagtttttgcctttgaatttagcataagcttccaccaagtttggcatttcacgacgacaagggccgcaccagcttgcccagaaatcaactaataccactttacccttacctacgtaatcggacaatttcacactttttccgtcaggagtctgcatttcgaagtcaacaaacttagtacctacggcagtttttttctgtttgtcggtcagttctttgatttttacaattgtttcatcgttctggaagttagccggaatttgttgcagtaatgcttcgttttcagcagtagagttgttgtagaaggtctgtttgaacaagaatacgccgaccgggttagtgatattgttttgtacgccttctttgatggctttatcatattgttcttccagttgggcaccctctttttgcttggcttctttctgttcatcactcaaagaactgtcacccattgattggtagatagcattcatttttttgctgatgtcgttgatttgagctctgacaatttgatatgcatcattgtttgcagtaccggtagcagaatcattgtctttggttaaggcaacgttaatctttccgttttcgaggaagaagtcaatcattaaaggttctccgtccacttcacaagtgatataacggctgacaacagaatcttgtgtaccttcaaaggtaaaagttccttttgtgataacggctgtatcgagtttgaccagatttctgccattggcttcctgaagatagacggtgtcaccgtcacttgcaccttctactgtacctgtgacaacgtatccggctttgtttccaccggtacaagctaccatgcccaacgcggccgttgcaataactaaataagtaaactttttcatgcttttgtaagattagtgaataaatatttatgcaaagatagattatttttctctcggccaccgaaaaacactgttatattagattaacacgtaggtgaaaaccgcagaaatgtgtacctttgcaacccaaactttagtatgaatatgcaagaagataaatccatcattgaggtgagccatgtctcgaagtattttggcgagaaaacagcattggatgatgtgactctgaacgtgaaaaagggagagtttgttacaatactcggaccttccggttgcgggaagaccacgttgttgcgtctcattgccggttttcagacggcttcggaaggcgaaatccgaatttcgggtaaggaaatcacacaaactccaccccacaaacgcccggtgaatacggtatttcagaaatatgccctatttccgcatttgaatgtatacgacaacattgcttttggtttaaagttgaaaaagacccccaaacagactattgggaagaaggtgaaagctgctttgaaaatggtaggtatgacggattatgaataccgtgatgtcgattctctttccggtggtcagcaacagcgtgtggctattgctcgggctattgtcaatgagccggaagtactgcttttggatgaaccgttggctgcactcgatctgaaaatgcgtaaggatatgcagatggaactcaaggaaatgcataaatctttgggtattacatttgtatatgtaactcacgatcaagaggaagcattgactttgagtgatactatcgtcgtaatgagtgagggaaagattcagcagatcggtacgccgattgatatttataatgagcctatcaattcgtttgtggcgaattttatcggagaaagcaatattcttaacggtacgatgatacatgacaaactggtacgtttctgtggtacggaatttgaatgtgtagatgaaggttttggtgagaatactccggtagatgtagtcattcgtccggaagacctttatatcttccccgtttcggatatggcgcagttgactggtgttgttcagacctctatttttaaaggtgtccactatgaaatgaccgtgctttgcggaggttatgaattcctcgtacaggattatcatcatttcgaagtaggagccgaagtcggtctgttggtaaagccgtttgatattcatattatgaagaaagaacgtggctgtaacacgtttgaaggtaaattgctggatactactcatgtggaatttctgggatgtaacttcgaatgtgttccggtagaaggaatagaatccaatgaggatgttaaagtggaggtagactttgacaaagtggttcttcaggataatgaagaggacggtacattgacaggtgaagtgaaatttattctttataagggagatcattatcatctgactgttttttccgattgggacgagaatgtgtttgtagatacgaatgatgtatgggatgatggtgaccgtgtaggtattactatccccccggatgctattcgtgtaattaaaataaccgattaacaggaaaggaagtgaataagaggtttttagtctttttgtcatcacgtaagagttggaccctcccttacattattttttcggcgatctttgtgattataccgttggtcctaattgttgtgtatgcttttactgatgataacgggcatctgacgtttgccaattttcagaagtttttcgaacatcccgaagcaatcaataccttcgtctactccataggtattgccatcattactacacttatttgtattttgctgggttatcccgctgcctggatacttagtaacagcaaactgaaccgttctagaacaatggtcgtattgtttatcctgccgatgtgggtaaatattcttgtgcggactctagctactgttgctctgttcgacttcttcagtgtaccgttgggtgaaggagcattgatattcggtatggtgtataactttatcccttttatgatttatcctatttataatacgttgcaaaaaatggatcatagctatattgaggcggcgcaggatttgggagccaatcccctgcaagtttttctgaaagcagtgcttccgctttccatgccgggcgtgatgagtgggatcatgatggtttttatgccgactatttcgacgttcgctattgccgaattgctgacgatgaacaatataaaactttttggtacgaccattcaggagaatataaataacagtatgtggaattatggagcagcactttcgttgataatgttgttgctgatagccgctacttcacttttcagtacagatgataaagataactctaacgaaggaggtgggctatggtaaagaaaatatttgcacagacttatttgtggatattgctgttgttgctttattctcccatcgtaattatcgtcatttattcatttactgaagctaaagttttgggtaactggacaggcttttctactaaattatattcttcgcttttcacaacaggtgcacatcactctttgatgaatgcactgattaatacgattactattgctttgcttgctgcaactgcatctacattgctgggaagtattgccgctatcggtatctttaatttgaaatcccgctcacgaaaggcgattggttttgtgaataacatacctattctgaatggtgatattataaccggtatttctcttttccttttgtttgtttcgttgggaatcacacagggatacacgacagttgtattggcacacattacattctgtacaccgtatgtcgtattaagtgttttgccccgtttgaagcagatgaatccgaatatttatgaagctgcccttgatttgggagctactcccatgcaagccttgtggaaagtaattattccggaggttcgtccgggaatgattagtggcttcatgcttgcattgacactctctattgatgattttgccgtaactgtatttactatcggtaaccaaggcttggaaacactttctacttatatatatgctgatgcccgtaaaggtggtttaacgccggagcttcgcccgctttccgctattatttttgtggtagtgctggctttgcttattgctatcaattaccgtgccggtaaaacgcagaagaaagattaatggaatactaaaatgtgctacgtaaataatatgaaaagaataattcctgttatcctgtttttactgactttgaccggttgctacaattccggtgaaccgcgtgagcgggtccttaaaatctacaactgggcggattatatcggggatggtgttctcgaagatttccagacgtattataaggagcaaaccggtgaaaatatccgtattgtttatcagacattcgacataaacgagattatgctgacgaagattgaaaaaggccatgaggattttgatgtggtctgtccttcggagtatattatcgaacgtatgttgaagaaacatctactactgcctattgatacgaactttgcgtattctcccaattatatgaacaatgtgtctccgtttattcgggaacagatcaataaattgagtcagccgggtgaagaagccagccactatgcggtatgctatatgtggggaactgcgggaatcctttataatcgggcttatgtttctgattcggttgcgtcgtcttgggaatgtctttggaataagaaacatgccggaaaaatactgatgaaggatagttatcgcgatgcttacggaacagctatcatccatgctcatgccaaggaactggagcaagggacagttacggttgaagaattgatgaacgactattctccgcaggccatggaacttgcggaaaaatatctgaaagccctgaaacctaatattgcaggttgggaagctgatttcggaaaagagatgatgacgaagaataaagcttggctgaatatgacttggagcggcgatgcaatatgggcaattgaggaagcgaatgcggtaggagtagacttagactatgaagttcccgatgaaggtagtaatatctggtatgacggttgggtgattccgaaatatgcaaagaatccgcaggctgccagttattttataaactttatgtgtcgtccggatattgctttgcgcaacatggatttttgtggatatgtaagttcgatagctactcctgaaattctggaagaaaaggtagatactacccttgattattatgctgatttgagttattttttcggaccgggtgcggacagtattcagatagacaagattcaatatccggatcgtagagtagtggaacggtgtgctatgattcgtgacttcggagataagacgaaagaagttcttgatatttggtcacgtatcaagggggataatttaggggtgggcattactattcttatctttattgttgttgctttgatgagtggttggatgatttataagaggtggcagcgatacaaccgccagaaacaacagagacgcagacgcagacgaaaaaaataaaaaggaactaatagattagttccttttttatcataagttgcttgtaatagaagcgttatcgtcttttcattgtacggagggtgtcttttgtttccttatttatgcggagagattcgattgttttctgtattgccttgttgtaagtccaatcgtccagtttgctttgttgcaggtatttcattgtcttttgcggaaatttaataaagcagatagagatcatccatgccatagccatgcgtgcgtaataggcttcatgcttaaatagatcggcatatgctaataatgaatcaatatgctcttcgtttatataatggaataacattacaatgccgaaacgtatttcaaattccttttgtgatttcagataaggctggataaattgccatacggtttcttctccttttcgtacggctgttttaagttcactgctaaaaatatcgcatactgcccaattgttgattcgaggaataaacaggcttatatagttaatctgttcgtcaaggttcattttggctaagccaataatcattccctgaagcattgtttcttcataataattggtattggctgtttcgacaaatggacgccaatcatctttcttgattatttcttttgccattgtccgcagttgaggtatacgcacaccaagaatattgtcggttccagggagtaggtaagagtggaattttcgatatttcggatctgctagtgcttttagttcttttcgaatgttttcagctgtagttgttttcatatagtttgttttttacaaaaataagaaaaaagagtgtgttttgattatatgtccactctctttcttatttcttttgtcaataatgtagtcactctattccttttttatagatttacagggtgttattttgaaatactctttatatctgttacgaaagttttttaagtttctaagtccgatcatctccggcactacatttacaggacattttccgctttctaacagttcgcgggctttttccatgcggatacggtagataaagaatttgggagcttctcctgtcagtaatttccatttattgtagaaagcggttctactcatacataattgtgaagctatgtcgtcaatagtcaggtcctctctgtctatattctctaaaatgaattctttcactttgttaataaatgtgcaattggcgttatctaagttttttgttgtctgtatccttataaattgttcaccgaatatttgttgtaaaaatgcttttctaaggaaacgactatttctgataagaacagttatttctatttttaaatcttctatatggaaaggaatatacagaaatgtatcagccagagatgtctctcttttgtgacgtcggtctatatcaatgtgggagccgtaaaggataataggaataatggaagtatctccggatgttttcaatcttgacgatagttcatttccactcatcccgtgcagtacggtatcgctaatgattaaatccggatgttcctcctttatactttccagtacttctgaaccattttcgaaactctttataatgtagtcttttgataaatgcgcttccagataaaacctgaaattttcattactgtcagcaatgataatagtaggcttggttgagcctctttggggaggaatcttgtggaataaattatctatttttttctcttcttgattttcattgatatgtattctagggcgttcgggtacatttttgtatgaatgctttagtgggaaattcaatgaaacattgtggtttaaatgattgataagaatcttcccgttgcataattctgtcagttttttgcaaaatatactttttgcaaaatcatattcaagttcttccttccgtttgagcaacggatgtcttttacatttatagcattgtatcagttttctattttcgaagttgtttatgctgattttccagtgttctgtacttagagagactgagagtataattgtttttttcggttcggtatagtcgatagcgttcttaataaatttgtcgatgactggagatattttactttggtcgatccatgcactggcataatgaaattcagttttaacttttaattttacctgcttatttgcggcatgatcttttagtgaattgactctgtctttaagaaaatatcctagttcatactctgcaatatctatgctttggggatgaataaacaattgttttaggttcattaatctgtatagatgctcattgagacaatctatactgcgtaatagttcctgtctgatttcttcagggtaattcttgttgcatatcatttgcaaagagatatgaatctgagtaataggaatacgtatgctttgaaaagaatctataaaatacagattctcttccttcaaaagatttgtttctttttgcatggtgataaaataggataaggaccagtataatgagactcctcctgctgttaatagaagaatggagtttaatagattggggatagctattactataatgatagaagtgaggagtgacgttgttattaagtatttcatatcaattcgttttttagaaacgccacttagtgggaattgacccactccttttgtttgagaaaaaagaggaagctcactgtaactatgatctcatagttgtacattgataaactcgagtagaataatgtttgagattatttactttttgaaggtcaatatctggaaaacgaggtctatatgtagagtctaaatcctaacattttgaatcatttttcaaggaatggtgaatttcctccaagtaacaataattaataaatcagtttttcttatttgttgaatgtcgcatattatgaatgcggcacgatgtgggaggtgagcgtattgtttgtatggtgctattgagagagctcctaattagcacctgtttgcgttttctcatatataaagtgaataattatgtaaaacgtcttttgttgtcagaaggtatctattgttacttcggtgtaaaaataatgataagtaataataaaaggaccgttttattatagtaaatgactgaatttggtaatatggtattgtaaaggtggtggttggtgttgtaaaattatgttttgttaatgctgtattcctatcatgttttgtgatatataaaaaagagcgtgtcatatatacgtatgacatgctctttgatcgttttatagcaaataagtatttacctattttttgctcatatcgaagttgaatgtagtaatggggaacttatctaaagttgtattacccacttctacctttgtcgcttttatagcaaattttaatgtttttccattataggcaaaatctcctttttcgtctgcctgaacagttactatcacagtaatttcggttggttctttttcatttgctgttagttgagtcgaaggatcaaatttaatttctagaggttcgggttgaagttgaagtaagatgttatctttgttttcgttgaaagtagctgtgtagggaattttgtaattgatatctccgatagctttaataataatttcagcttggtccggatcttcgatgatacttttaatcaggtcgtcaacaggaaaattattgatagcaatttcgttgtcttttacttctgcgtttacttcaattcctactggttcttcactttcaccagcattttctgtggggatgacaggggctgattcggttgtcattttacccaagtagtttccttctacgtctttaagagaatatacaggaatatcctcatcgtcatcattactacacgaagtaaaggtggtagccaagcttagtaccattacgaataaaacgaaacgattaaaacaatatacttttttcatttcaattaaagttttcatactgttaaaaattagattgttaattttcaaaattaaggtgtacgtacaataagtaaatacttgagatattgaaatactgcatgaagataataaaaaagacaaataagaatagtgacactattttctgaggaaggtgtcactgtttgagtgggatagtgaggctgtctaacaacaaaaagatagatggtctctttttggtaaaatcatcttctatggtctatgcaaatagtaagagttgtctcattggtctttcgataacactccggaaggggttcaatctttattggatttgagagctggttatcggctctctttatccgaactcttgtctgtgctgaaaacatggtaagttatgttattgcctgacaaagacttggtgagattttgaggatggattattatacgtgacaacttggtcaagcaaaaagtattaagcataaagtcattggaaacattctcccaaatggctgagttcgctgcttacggagggaaaacacaaagcgtctgtaatcaatgttgtaagagccaatatcatagcaatgtctttttccgtgatacgaaagtaaattccattcgtagtattggtcgtataataaaaagttcttaattttgaaaatgtcttatgtttaggaagtagctatatacttctgatgagcagttacttgcatatacaaacttacccaagaatacgttgatgttagtaaacttgggtaagatttcatagatctgctctgatactaaagaatatcagtttaaatatcaatatgtatctattatttctttaatactattcatgttgtttatcacttttctttcctcaaaaataccaaataaaaagtcgtttgtcaagtgtttcagaagaaaagctgattattcattgaaccaatctattttctttgagaaatacatcaccattgccaggataataaataatcccaagctgcctgtcaacagagcaaaagtctctaactggataaggacaaatatataaagatagagtactcccaataacccagacatgattaatgaaggtttctttctcttggtgatgccaaacatatatccgcctaccagtataatagtcagtgtagcagataacagataggcagggttgaagccgatgtgttcggagaaggagaggagcaaactgtaaaatagacagagtgccaatcccactaacaaatactgtaaagcatgaatacgggttttattcataatttcagtgaagaagataacgccgaatgtcaacaggataatcaggatagcatactttgcggaacgcatggattgctgatactgctctaccggaatcttgaaattgacgccgaaactggaattatctatatttttaatattaaaattggtatagtcaatcattacttgtgagtaattccggttcaagttcaagacttgccattgtgccgaaaattctttctcggtaatatcccggttattgggtaaatagcttcctgtaaagctcggtgtgttccaattggctttcaagtcgacgcgggttgttttacccaatgggatgaagttaatggattgcgagcctttcagtttgatttttacttcgtaaggcaatttcttattgttcttcagttccgataaatccgcaatggcatgtacgcccgtattatcaatccctctgttatccattcccggctcaaatacatagacggaatctccgaaggtgatactaatctgttcgctgataccacgcatgtcggtcagattcagacaaatagcggctctgtcgaattgcagttgccccatatctattctgctctttatcagttcttccgagctgaaagaacctttcagagtcagttccgattgatacacattgacttcatagagacttcttttcaggatttcggtcttaagttgcccgttaatcaaaagctcgtcggggaaaagtatcaggtctttgattgacaccttcttttctccgttgttctctgtaaccaccggatattgaatgttcagataagggccggtgacggtctgtgcgagactccatttctcgcttacctcattgattgcttcttcctgcgtgcgtccccgttcggaaataagattttcaatcatgaacataggaatcatcagaagaaggattaatcccccgataatgaccaccttgattgttttcgagaaacggtgaaggcatcccataggttgctgtgcctgttgctcgtttgaattttcattgaaaccgtccataagctgatagtgtttagatgaatgaattattctgattttagaaattgctccagagcttcaatatgagatttgaaagcttccctgccttgcgaagtcgcttgaaaggcagttcgcggctttcgtccgacaaaacttttgttgcatacgatatatcccaattcttccagggcacgggtatgactggcaaggttaccatcggtcaatgcgagctgctctctcagaaaattgaaatcagcttcctcattaaccatcagaacagccatgatacccagtcgtaccttgctttcgaatgctttattaatatattggaatgattctatcatttatgatttctttctttcgtaatgtaaatagaacaatatgccatagaggatatggaaaccaccgaaacctatcgtccagaacagaagtgaatgacccgcccagaaacagtcgacagcgcccaggcaaataaaagcatatcctaaccatgccacactggaataggtaaacttggatgcattgaccaatgccagtccgtagaatagaagcatgacagatgccagaatatcataatattcgtgcatcaggatagaaatacacacaataccgcctgtcagcatcggaagcgaaaaattccataatgcccgataggtgagccggctgaaaaaactctgtcccgtcttttgggatttacagtaagacaggataccggcagtaacggctgcggctgccaataccgataaggctattatagccataaattccaatgtgacgattaaatgcgtctctggtgtgataacttgtgtcgcgatgtacgcgccagccaatgcgtaaatgcctgccaggattgcggcaagcccactaacagagataaactttgaggacttttccatcaactcttttatctcatttaccgattctaatgctttatctttattcatgtaaaaagtactttgtgatacaaagtaaaataaaacatttaagatgaacaagattttatctgattatttcaataaataggttcaaaaaagaagttggatagatgaaattagtcaaatatttgactaattcgacgaagatacgtatctttgcgcccgaaaaggtaaaaacgataataaaaatgagagaaggagcggagttcagagaactcatgttgcaggttgtccgtacacgtatggcttttcgtcggtctatgcaacgaacattaaagaagaataatgcaggtattacatttgagatgcttcaagtattgagcagtttatggcacgaacaaggcatcagccagcagatattggcggagcgtatagcgaaagataaagcatgcctgactaacttgatgaacaacctggaaaagaaaggatacgtctgccggaaagaagacccgaacgaccgtcgtaataaactggtatttctgactccggcgggtgaagagtttaaagagcagattcgtccggttttagaccaggtttatgtatatgcagaacacattatcggtattgaaagtattgaaaccatgttgtctgaattaaacagtgtttatgatgttcttgaaaaaatataaactatatccggtcattttattcagcctgttttcttttccccaattgatagacgcacaaacagactctttatttcttactgtcgaccaactctttgaacggggcgtacaatatagcctgcaacttcaggcggatgcaatgaaagaatctatggcgcaggaacggacacggactgcaagaactgcgcgactaccggaattacagattggactgaaaggcggattcgtcggtcaacccgtcgtttgggagcggggactgtccgcacctctctacccggacgcgccggactggtcacaaaattatgcgattgatttggcgcaacctctctatcagggcggtaaaatccgaagtgctatccataaggcggatattgaaaagcaagtcgctgaattgcagactctgaccgaccgagcggagattaaactgaaactgctgaatcagtatatgaatctcttcagcctctttaagcagcatgagatactgatgcgaaacattgaagaatcggaacttcggttgcatgatatacggcggatgaaaaaggaagggctgattaccaataatgacgtattgcgaagtgagatgcagttgactaacgaccgcctgtctttgcaggaaacggaaaacagcattgtgcttgtatcgcagcaactcgatattctgttggggcaggacgagaatgtattattgcggccggatactgccctgctttatcaagcagttgccttgcaatcttatgatgattatatcgttcaggcttatgcgaacaacccggtgatgaaattgcttcgtgcacaaacggaactggcaaggaatgaaatccgttcaaccaagtctttctcattacccggtatatcgttatatgcatcgaatacattggcacgccctgtctcgcgtaccttggcggatatgtacaataacaactggaatgtgggcgtatcggtttcttatcctttatcctcattgtataagaacaatcataaaataaaagagagcaaaatgatgatgtccttgcggaagaacgaggaagagcagaaaatgcagggaatccgcatggaagtacgttcctcattcttacggcatagggaagccatgcagagggtagaggctttgaaactgtccgtccggcaggcggaagaaaattaccgtatcatgcagaaccgctatctgaatcaactggctatcctgactgatttgctcgacgcaaattccgtccgcctgaatgtcgagttgcagttggttactgcacgcacccgtgtgatttatacttattatcaacttcagaaggcttgtggtcgtctttaatatacaaaacagatatggcaaatcaattgaaagaaaaacagaagaagctgaaaaagctcagaacccgcaatattattttaaatttggtatgtatctgtctggcaggttccggcctttggtggactgccacttacttttggcgttatgtaaattatgaagtgacgaatgacgcttttgtagaccaatatgtagcgcccttgaatgtacgggcttcgggttatataaaagaggtatgttttaaagaacatcaatatgtgcgtcaaggggatactttactggtgcttgacaaccgtgaatatcaaatcaaggtgaaggaagcggaagctgctttgttggatgcacatggctcacaagaagtgcttcattcgggcattgagactgcccatacaaatatcgccgtgcaggatgccaacattgccgaagcaaaaacgaaactctggcaactagagcaggattatcatcgctttgaacgtttgttgaaagaagaatccgtcccggagcaacagtttgagcaaattaaagctgcctatgaagcggcaaaggcgcgtaatcaggcactggttgctcagaaacagtcggtactctcacaatatacggaaacaagtaagaaaacaacgagtgcggaagccaccattttgcgtaaggaagcagacctcgacttggctaaactgaatttgtcttatacggttcttatcgctccctatgacggatacatgggcaggcggactttggaacccggtcagtatgtacagaccggacaaaccatttcttatctggtacgcaacaaggacaaatggataaccgccaattataaagaaacgcagattgccaatatctatatcggccaacaagtgcgtataaaagtggatgcagtgcccggaaagattttccacggagaagttaccgctatctccgaagcgacgggttccaaatattcattagttcctacggataactccgccggaaattttgtaaaggtacaacagcggataccggtacggattgaactggaagatgtctcttcggaagaaatggcacagttgagagccggtatgatggtagaaacagaagctctgcgcaaatgataacgatgaaggagttggaagcacctgtccgccaatgggtgcccgattggcttggacttatcagtatcttcgtcgtgattcttcctgtcactatgctcaatggttcttatacgggtagtatgctcgaagtttcgaatacactcggtacgaattcggaagatataacaatgggatattatgccgcttcggcaggcatggctatcgcgtatcccattattcctaaagtccttgctgccttttccgtgaaatcgctgttgctgattgacttgatactgcaattcttcctgagttgggtttgcgcccgtacgcagaatgccgatattttgattgtttgcagttttgccgtcggcttcttaaaaggatttcttatgctgtggtttatccgttacgcccaaaagattttcagccggaagaatgtgcgtagcgagttttattcttatttttatccgttagtgtacggtgggggacaggcttcgatgttggtaaccgctctgttggcatattattataactggaaatatatgtattattttatgatgatgctgattttgatagctattctatttgttatcatctgtttccgtcataaccgccctgttaaagccgttgccttgtccgacttgcatattcgtgaaatgtttgttatctcgaccggactgctgatgttgatgtatgttatcaattatggaaaagtgctcgattggatggcgtccggcaaggtatgcgcatatatcatcatagctcctatgttgattgccttgtttatctggtatcagagccattcggagaaaccttatgtaagtcttgcacccttatttcaggctaaagcgattgtcggctatctttatatgatgcttgtcatgtttttcagtacatcaaccactttattgactaactatctgactattattctgaaagtggacactacgcatacctattccctttatatctatctgcttcccgggtatatagtcggtgcgtttatctgcttctggtggtttcgctggcagcgttggcgtttccgctttctgatagcggggggaatgagttgctttgtgattttcttcggtatcctgtatttcggcatctctccgaatagcacttatgagatgttatacctgcccttattctttcgtggcttgggaatgttgactttgattatagctttcgccttgtttgccgtagaagatttgaatccgaaattcttattgtcgaatgctttctttctgattattttccgttccgtattgacgcccattatggctacttcgttttatagcaatgtactgtaccggctggaacaaaaatatatgtattctttgtcggagactataacgactgccgacccactggcagcgtcacggtatagccaatctttgaacaacgcactggcgcaggggcacggaaatgccgaggcggcacaactggctactaattctttatataccaccttgcaacagcaaagtctattgctcgcactgaaagaaatactgggctatctgctggttatatcaatcatcattgctgttgtttcccgttttattccgttccataagacactccgtgtcacatttaaaagaacaggcgacgatatggtttaatttgtccttcgcggattttgatgaatggtaatgtaatgattgttagtgaatttttatatctttatggcaaaatctaaaatatggagacaaagaaaataatctcaaaaaagaaaggctttttcgaactattgcttgtgactgttgggcaaggatatatgattgatcgatattgggaacgtggtggtatattcgttcttttactatttatattgtcagtactgccatattcatcgaaagcccagatgtcgtctgatagcctcgtccaaaaaatagccggatatatcgatgctatacagaattttggggatgtactgccgcaagaaaaagtctatttacactttgataatactagttattatcagggagatcctatttggtttcaatgctatgtcgtcacacccggactgaaccatccgacggagctaagtaaaacactctatgtagaattgttgaatcctggtggtgagataatttcaaaacgagtattacctatacggaacggtcgttgtcacagcagtttcgaattgatgcaacttcctttctattccggtttttatgaagtccgtgcctacacgaaatatatgttgaattctggggaggagattattttctcacgcgttcttcctgtttttgataaacctgctaatccgggtgaatataaagagaaaaatatacaaaagtatgcggtttacaagtatccgtagaccagaaagaaagcaatgaaggcaaaaaaggttaatttaaagttctttccagaaggaggaaatttggtaaaaggtgttccttcacaggttgcttttgaagcaactgatgcttacggaaatcccataacgctctttggtaggattatcaatcggagaaaagaagaaatcggtcattttgccactatacatgaagggcggggcgtatttacttatatacctaccggtgaagacgctgacaaagccgaagtggagcttggtggaaagaagtatcgttttgacttagtgaccgtagaacaaagaaagagttgctatccggttcaatacattattgaatggggatagcaactctttttcatctatatcggtgatctttttataaagtaacgcctgtcttgaagatagctatttcgcgataacctttcttttcattgttaacgaattcaccgctcgccactttgataacgtagtcgataaaacgttcgcaagtcttttccattggttcgttctcaacgattactcctgcattgaagtcaatccaacccggtttgttcttcgctagatttgaattggtggaaatcttcattgtcgggacaaaggtaccgaaaggcgtgccacgtccggtagtgaaaagtaccatgtgacatccgcaagcggcaagggtagtagcggctaccaggtcattgcccggagcagaaagcaggttaagtcctttcttttgcaggcgttcgccgtaaggcattacaccggacacataactcttaccacatttctgtgtacatcctaaggctttttcttccaatgtagagataccgccggctttgtttcccggagacggattttcaccaacaggctctccgtgtgacaggaagtattctttgaaatcattaatcaaatgtactgtctgttcgaacaagccttcgtctgaacaacgattcattaagatagtctctgcaccaaacatttccggcacttcggtcaggacactcgtaccgccttgtgcaatcaggaagtcggagaacatacccaatagcggattggctgtaatgccggagaaaccgtcggaaccaccacatttcagacccacacggagttcagacaaaggaacatcggtccgttcgtctttggatactttggcatacaattcacgcagaatttccattccttcttcatattcatcacctactttttgagttaccatgaattttacacggtctttgtcgtactcacctagaaattcacggaatacatccggctggttattctcgcaacccagacctactaccaacaccgcacctgcattgggatgaagcaccatgtcacgaagaatctttttcgtattttcatggtcgtcgccaagctgtgaacagccgtagttatgtgggaaagcaacgattgcatccacgccttttcctgctgtttcacggcgcagtccttctgctaattgtccgataataccatttacgcaaccgacagtcggaatgatccatatttcatttcttacgccgacatcgccattcttgcggcggtagcctttgaaggttaagtctttatgagggatatccaaagagacctgaatcggattataggtatattccagtaatccggcgaggttcgttttgatattcgtttcgttcatccagtcgccttgtttctttgccattagggcgtgtccgataggatagccgtatttaatgacgttttcgccttcggagaagttctttaatgcgaatttgtgtcctgcggggatgtcttcatttaatgtaatctctattccatctacggagagatattctcctgccgggaggttaacaatggcaacggcaacgttgtcggcaggattaattcttaaatactttgtttccatgtacttgttagttggatttgtttttttgttgttatttgctatggtaataatcaatggtttctactgtcaacaagtcaattggcatatagttgatgcaggtcacttctttcttgaaaataaggtggtcgcaaagagctttaataccattgaaaccttgcaattccggttgctgggcaatgaggaaggaaacacttccttctttcaggcaggtgacattccgttcgagaagatcataacctatcaggttgaagtctttctttccgtgactttgcagatattcgcccacgatgtagactttggagttaaaagtaattccgttcttcactgtcgggtgggtgcggaagagttcatccagcatctcattgtcttcgtcgttgcgttcggcatgcaagtcgagctccagtatagtacaagacggatgatattcttccatgtactgcctgaatccgatttctctgttctcttgctggttagaaccgacaattccttcatgtattttacggaaaatgacgatttctttttcatctctggcgagcagcatcaacatccgtgcagcaaaatatccgctctgacgtgagttctggccgaagaaggcgaggggaggaacatccttgatattcgagtctatatatatataaggtatgtctagtgtgtgcagccggtcggtgaatcctttcgtatattgcggagcggtgggggccaccataactccgtccggttgaagagtgataatcgtttcgctggcatcaacaaaggaatgatagtcgtatgggtcgtagtagttgattttcaccgaggtattaaaatctgaataggtagcaatagcctcgtggatacccagttctacggcagtccagtattcaccttccaaatgttccggcaaaaggcatatgaacgtatatttcttattggaagccagcgcactggcatacatattaggctggtagtcaagctgttttagaatttcttccactcgtttcttacttgcttccgatactccgctacgactgtggatcacacggtctaccgttcctactgatacatctgccagacgcgcgatatctttaattctgattctttcgggcaatttattcatacgattaccttatttatataggtttttgtgctcgcacacaataataatcttaatattttcgatacaaatatataacaatttttgtaattacgaaaattgttgtatctttgtgcccgcacacgaaaggtgttgtatactatcctatttatggattaatagtcattatatcagtgtgttaagctcgaaaattagctaaaaatgataaattgaaagttcataatattaataacttagaatttaaaacataagattatgggaaagaaagtcgttacattaggcgaaatcatgcttagattatcaactccgggtaatactcgttttgttcaatctgattcttttgatgtagtatatggtggtggagaagcgaacgttgctgtaagctgtgccaactacggacatgacgcctatttcgtaactaaattgccgaaacacgaaattggacagtctgctgttaacgcattgcgtaagtatggtgtgaagacagactttattgctcgtggcggcgatcgtgtaggtatctactatcttgaaacaggtgcttctatgcgtcctagcaaggttatctatgaccgcgctcattctgctattgctgaagccgacgctgttgacttcgactttgacgctatcatggaaggcgctgactggttccattggtctggcatcactccggctatctctgacaaggctgccgaactgactcgtttggcttgtgaagctgcaaaacgtcatggtgtaactgtttctgttgacttgaatttccgtaagaaactgtggacaaaggaaaaagcacagtctattatgaaaccgttgatgcagtttgtcgatgtatgtatcggtaacgaagaagatgcagaactttgcctgggcttcaaaccggatgcagacgttgaggccggtcacacagatgctgaaggctacaaaggtatctttcaacagatgatgaaagaattcggattcaaatatgttgtttctacattgcgcgaatctttctccgcaactcacaacggttggaaagctatgatttacaacggcgaagaattctatacttcaaaacgttatgatattgatccgattatcgaccgtgtaggtggtggtgactcattctccggtggtatcatccacggtttgatgactaaacctaatcagggcgaagctcttgaatttgcagtggctgcgtctgccttgaaacacactattaatggtgattttaaccttgtttccgtagaggaagtggaagcattggctggtggtgatgcaagcggtcgtgtacagagataaagagataagttgaaagtttaaaaacaattcatttaaaataggagattaaaatggcaaaattcgataaaatagccgtattgaataaaatcggttctacaggaatggttcctgtattctatcacaaagatgcagaaattgcaaaaaaagtggtaaaggcttgttatgacggtggtgttcgtgcttttgagtttaccaatcgtggtgactttgcacaggaagtatttgctgaaatcgtaaaattcgcagcaaaagaatgtcctgaaatggcaatcggtatcggttctatcgttgatccggctactgccgctatgtatttgcaactgggtgctaacttcgtagtaggtccattgttcaatcctgaaattgctaaggtatgtaaccgtcgttcagtggcttatactccgggttgtggttctgtatcagaagttggttgcgctcaggaagtaggttgcgacctttgcaaagtattcccgggtgatgtttacggaacaaacttcgtgaaaggtttaatggctccgatgccatggtctaagttaatggtgacaggtggggtagaacctacaaaagaaaacctgacagcatggattaaggctggtgtattctgtgtaggcatggggtctaaattgttcccgaaagataaagtggcagcagaagactgggcttatgtaacagctaaatgcgaagaagctctcggctatattgctgaagctcgtaaataagattagagagcgaaagctgtctataataaaaaagaggctggtgagacagcctcttcaaaatatgcctcaaagggttagttagtttagttagtaatgaggcatattttcattttgtttaaaggtgtttaaaggggataggtcatcggaatgagtgattcatttcggtggcttgttttttgttacttttcattaagaatgatgaggcaatcgcattttgatgacacgcccgacaataagagctataatatagaatacggcaaaaccgataatagaaaaaacgaatggcttttgttcattgaaggtacgtcgtggaggaatgacagtgtaagtttctgacgtaacctgattggttggctgtgtggcaggagagacctttagtgttgttcctgttgtttccatttgacagctatctgttgcagatattgtatcctctgttatttctgtaaacatatctttttccctttttatttgtatctgaattcttgtaattgttatcagttataacatagtacatagacttttgtttaagggagcaaagattgttgcaaaggtaattaaaaaagtaaatgatgaatcaaggggagtgcattctttttaaaagatttgatgtaggtcaatttttaaggcctttctttcttgttgtcttttgataagagtgccatgtcgtgtgagttctttagagagttacacggataatatttgtaggcattatccgtgtagtagtgttagagtaacaattattcgggtacgtaaattatttccccgttatccaattcataggcgataccgattttcttgccacgtttcccttcttttttatcctggtcctccgaaggagtataccgattgattttttctccttctttggtgatgatttccatattttccttacccggatttttcaccatggtgaagtcttcttgcgagaatacctcagtcatgttgtagcggctgacaagggcaaccattaaagctactgcaaataccatagcaacgtcaaacaagttggatactacgctgatggggtcggagtcttcttcttttcgtaataggttatgtttcatttctcagtagttttagtagtacggttttcgttcagaagttcagcgataaattcgagattggtcatatcttgcagataccaacgttgcttaacctgctgtgtgagaaacccgacggcacctgctaccaatccgaccacggtcgtggcaaaggcaatctgcatattataagccatggaagcaatatctccgcttgccagtccggccagggcagggcccattggaatcaaagtacccattaatcctaagataggacctagtttggtcagcgtttttgagattgcaaggtctttgtcggctgcaatctcaaagttagccaataaacgttgtacttgtgcgggagtatcacgggcatccagtacctgacgcatatacataataacgagtgaacgcgacttttccggtaacttggaatttagttctcctactgtttcagaagttagtttccccagttcattgcggagcaaagcttctgttttgcgaatggacatatactgtccgtagaaactgcctgcaagtaacagtgcccggcagaagagaatgattaataatacgatgacaggaacaagtaatcctgttgaaatccaatataaaatatctgatataaagttcattgttgttgattatttaataggtaattgattctttttattgcttcatgcttttctgtttgtttctgttccgaaagttccaccagacaagaccgatgattccaccggccagagtgataaccaaaacgcctgccagtgcttgccagtctatttcgctgacacctgtcgccgaagttcttccgttgacggtggctacaattcctaggatagctaccagtgcattagtgaggaagaacaattcgaggcgtaattccttctccggtaacaaatagagcaataaatatctgccggaaggaattgctatcaggataaaaccggcataactccaggctattgtctgaaaggaaatgcccggaaaggcgaatatcaggtatattaacccgctgaatagaaccgggaatatcaataatccaggaaaccagcggagaaagcggtacatcacaatcatacgaggtttgaccggataatcgttcgccacgtggacagccagcatggcgtaagccatttgcacgcagacctccacactaagcaatacagctgtatccaacatcaaaggttgattactaagccaatttgctatctgggttttagactgttcaatagcatacggccacattaatccggcaaacgcagcgcagatagcggcgataacacacaccgctattactttccaaaatgtttgcttcagcagaaaattaaatgctgtcagaagcataagtacaaggacaactgtattcatttttgctaattacaaattatgagttacaattacatttggctgcttttacggcgtttgcgtacaaagaggattaaagcaagtaggacaatgataacagcaataccgacagctacattgcttaatgtatttgtttgttcttcagtggtctggttcatttcttcttttttcatcactactcctttgtcatttccgcttgcttttgcttcacggattttggagatattctctttgtattgtgcggctgttggcgcatctgctttagaagcaatataatcgcgtagttttgcattgtcgcagacgaagcccgaacaggacggacgataattgttgactatctccgtatgtaacttactcaattctgctacttgttcttcgctggctttccataatcctttgcgggcactttcgagcatgacagccgtcatttcctcgagagcggcaggattctgttgttcaaagtatttctttactcccaagttaagctcgtcttttacatatacattatagatattatcccaaagttctttatcaatggcggcagttttcatcacattccaaccataagtgttggtgataacttctgcaaattcactcgcagaagaagctcctcctttcattttctctttaatatagaccggattgagaatagtcgtacgactttctacaccgacagcttctttaagttcctgcattttcatgttattacgattgcgatagtcgctgaggtaagcgtccggatctttaccggtcacattgcgaacggcaagattcatgcctcccataaactcatatacatggtcaaggcttaaggcaccccaagtattgctttgacgtggctgtactactacatctgtacgtgtcaatgctgcttcaaaagcaaatttttggaaaacttcccagttcttttcactaccgtaataagctcccatattattgagataggtagtagcaagttccgattcattttcccaacggtcaccggattccaccatttcctgaataccggtaccgtacataccgtttattcctccgaatatgcggaaagttgaaatctcccgggcgtctttcgggctcaatcctttttctgtcaatacccgttcagcctcaattacacttgtcgctacttggttctcgtatttatcatctttggcaccggcagccatttctaccgcacggttaatcaggaaaagacgggaggcggcaaggtcacgaagttgtccggaggtctgaactaccacatcaatacgcggacgacccagttctgccgaaggaatcaattttaaatcgctgacacggccgaaagcatcacgaacaggttctacaccaagcatataaaggacttgagcaatcgttgctcccccggtctcgatgaactcggaggaccagagtgtatagcttactttccgtggtatagaatcgttatgacgttgtttgtacgtatcaatcgtttgtttggctaaagcaatccctttttcccatgccgattcagtaggagtcgcttcagcgttgatagcgtacatattgcgtccggtaggcaatgtattcggattagctatggggtcacctcccggggtaggggtggtgtagcctcctttcaatgcattcatcagactagccagttcttcttcaggacttgtcaaaagtgcatttttatagtttcctatattcttaatagtgcgttccacttctgtgacagccaaagaaaactctatatcttctttgctatactctttaggagcttttcccggatccatgttagtgcccattttcttcatggcttctttcatgctttcgggaattttctcatgaggggacttttcactttgctgtgcaggatgtcctcccattttcttgttcttatcatctttatcttgtttggctgcggcaaccatcatcatcgccatcattcctttcggagcattccggtcagcttctatttggcgtgctttagccagttcctgaggagtaattccggcagtacggcagatcagttcgtctgttgcctgtgcaggattggttatcagcttttctactaactggcgggcaggatttagatattgctgtgtaaaaagactccggtgtttgttgatagcgttcgttgcttttccacgttgcttgtcaagagccaaaaggctgtatgcgataggttctgttgccattgcgtaaacagaagaagtaatccgttccggttcatacggaacacccatagtataaagttgcccggtgattttttctgtggccaattcttcggcgaagttttctatacgggcgatttcatcctctgtataaggcttgttggtgatgctgtctagacctaaatctcggtggattcccatttttactgtcaatgctttgatggccagcgattcctgctctttattctcttttgcggagttattgtaaatcttgattttctccataagctcacgatagataccgcgcacgctactttcgaggaaaggaggagtaaggtaagattgcagtgtcgcatacgaacggcgttttgccatcattccttcacctacatttccgatagaatagagataaaagtgaggaacagttccgaccagacggtccggccagtcattgctgcatagggcaacttgttttttaggagtgaattccaaactgccatgtgttccgaaatgaatgagtgcatcagctttgaaaccgtgctgcatccataaataagaagcgatataagtatgcggaggagcagcgttcgttccatgaactacctgaaaagaattgtctccacttcctgctgcattctgtggcattaacacgatattaccgaactgtaaccgggctacgcccaaacatccgtccgaagtgaccatatagtttccgggaaactctccgtcggcagcaacgacttctgcatatttttcaggacgaagcgattctttcacccagctttcatattgttcttttgtaattaattccggatttccgtttttcatgaactcgtcaaaagccccctctgcatacgagttgaatactgcaccttgtgcttgtatcatttttgcaagttcttgtgcattggcaggaagtcctgatacattataaccttcctgtttcatgcgaagcaagagattgtagagcgaaggtactacttccattccggcagccgtcaaggcattttgtcccggtcctttgtaatagtagatagcaacctttttgtctttattaggctttgttttcagattcagatagttgttgatagtggaaacgaatgttttcagtcgttcgggaatggcgtatgagtggcgtaatccttctttgtcttcatattgtgcaaaaagggcaaaggggcggatagcaccatctatttccggtgtcacaatgctttgtgacataaaaccaccggacatacccaacggatcgttttcccattcatccacaaggctgttgatcgtgagtggggcaaaaagcagaatattcttagttttcagataatctaccattctatcccccatgcgtccgtgagccatattaataacagcgtcaggctgcacttcatcaataaacgacatgaatcttgtcattgactgaaccggataaacgttgtagccttctttttcgagagctttgatgaggtcggtagcatctgccatttgtccggtaattataattcttcgagctccttctttgtagaggttgttgtctttcataaatttctcatagtcggtaactgtgagaaattccagctcatcgtccggattactgattccggcatgatacaacatatcgctcggcctttctaccgggtcttccatttcagttgtggaatatgtttttccatcaatggctttacggatgtagttcaacatattcctgtagtttgtttttccgccattgctcagatagcggcgtatcagattctgttgtacactatcgaggttacagatattgttggtaggattggtggccattgatgtgtacacagggacacctttgtctgctgcctgctgtatttgctgacgctgttcttcaacgatacgcagtcccatgccgttaacaaataccatatcataatttgacaggcggtcgaggttggcaagcgatacttcgctgagtttgatgaatgaattgtcatttgctttcgatatgcttccctgctgtatggtctggaagttgacgaaagcaatctttgtggcgctgaaccaggcattccagatagatatgcctatcaggacggctgcaacgatgcacacacctaagatgattttacttttctttttcatttctcttatttttagctttgtatgtagttttattgttgtttattttttgaagaaccgatctatatccaacgaaagacctagtgtcagattagctcctgtcgtagtgggtgaattgaaataataataatccggtacatagttaaacaagttattaatagccagattcatattcacacctttgaatactcccaccgagaaggttaaatcccaaatcatatatcccgggtacgtaacagcagtgcttccggcagcagggttgttgaagctatcgttgtatacgtttgtttttacttctgacaagatgcgtccgttgagtgaataattgaaatctactttatctaggttttcgccccagtctactcttacagttgccgtatgcgggcgcgtatctgtgaattttttctgcccgtcacgcataaattcatggatgtaagtgtatgacatacgaaatcctaatccacaggggtatttggcagagatgttagcgtccactcctgcaatgtccactttgtcggtattggtatatatttgtcctttgggatcatcgctgtaaactgtgttaatacggttgtgtaccagattataatatcctgttacagaaaaattgtaacggttttttgtgtactcggcagacagggagaagttgtggcttgtttctgatttaagatcaggatttccataaatcatcatcatgtttgccatattgaacaccatatacatttcttttaaagtcggtgagcggaatccttgtgaataagaacctctcaatgaacagttaccaatcttatacatcattcccaaatgcggggataaatgacgaacattggaatcggagaaataatcgaaccgtaatccggcgattacatttagtctttcagtcggattccagtcgaattgtccgaaagcatctgctgtatgcatgatatagttagcgttatcagtgaattggtaagacatcagataatcgcgaaggtaatcggctccgacagtcaacgtatgtttttcattgaaagtgtaattataaagagcgtgtacattatgctgcacattgctataatcacgtacatcatttttatagagtacctggtaatcacttttgtcatattggtcgaaagtgtaaccgacttcaagattacttaatgtgttgaatgtataatttgcttttagcccaccgttgaaatcccggtatctgtcttgagtgtctcccggtttattacgttcacggaaataatacccggctcttgcggtcagtttaagtgtttccaatgggtgatagatcagccgttccttgaagttccatactcggcttccgaatacagttgagaaatctcccggattatctacgccatacgtatctacattattatattgtacattggtcaggctgttgaatttacctgcattgaatcccacagtaccgccatatcgatggtcattgtgctcggagaagcgtgaattaagatttaaattccatgggtcatccgattcgcgtgtaatgatgttgataacccctccgatagcgcttgaaccgtaaagggtggatgctgcacctttcacaatctcgatgcgttctacattatcaaggttcagacggtcgtagtctacgttatttagcgtttcaccggccaaacgttccccgtctacaagaaataatacagagtttccgccgaagccttgcatattgatagaggtttgctggtccatagcaaaagtgaattcaatgccgggaagttcagtctttaacaagtcggctacattattggcatttacctttttaatatcttccgaggtaatcacccgtgtaatgataggtgcatctttcagcagtttgggagtacgggtaccggtaactactaccgttcctaagtcaaattgatcttcggatagacggaaacttagttttttgttttcgtccgttgtgaatttcttttctgctgtttgataacctacgtaagaggcggtaatgatatacacgccagttccgggtagttgcaatgtatatgttccgtcggatgtggtgacggctccagttccttttccttttatagagattgtggcgccgggaaggggtcccccgtttgtatcagttacacgtccgctgacataattactggattgttgtgcaaatgtggagcaagttgctataaaggaaaataataatattataaatgtaggtttcattctttgttattgttttcttagttattttcttcgaaatcaaatggatataggaagtcgaagtcgatgtatccctttatacctttggcattggtatagttggtaaaacgaatggctgcataggtgttgtctttcagtcgtatcaggtagacctgattggacattgtgtagataggtggcatagtcgaagtatctacattcagccaggtggataggatactgttataataagagtcggtatagacaatgtttccttccatcatgccggacatatcaatagcaattttgtccgttgtccattcatctttaacaaagtctttgtcatcaggcaattttccgtttgctttcagggcatcaaaacttgtgtagctcgtttggtaagctgccccttcattcgtttttatatcatagcgatgaatggcgatatcccaattatcgggtatttcgctttcatattctttcccgattttgactgtggtaactttacgaccggaaaaatcaatatatgcccactctgtgtactcaacagttttgatttgtgagaaactattttctttgatttccatttcagtttctgtgggggcgtcataaatattctcaaataatccattacaagctgagagcgacatagccgctcccagtatcattgtatatttaaaaatagtgttattgcttcttttcatttctttcatttagattgtttattctgcacttgctgtatcacttcctgtaaatactgtggaaatagctatcggcatactacccggcttgaagtcagtgttaatagtagcagtaccgtctgctgcgattgtaccgctcaggctttctcctgtgatagcttttccattgctgtcggtagattcatattctcccaggctgagtgaataggttccgtttgctccggctgttacattgactccactgatagtgaaattacctaaactcatatgaccaccggcacctgacaagttagcgaaaccgcttaaagtaatgtctaccgttgtgtccgatacacgtttgataacagctttacattcatcagttgtgccgtaggatgtatctccaacactgatagacaatgaactgttatactgataggtagcagctatattataagttatcggtgtttctccttgcatgaacacgatttccatttctcctatgggtgtcggaatatctacattagtcttcaaggttaacactttggattcatttacactaccttccagtgtgtagttataactactacctgtgccactgcccatggacatcaccacttcacctgaaccactgaaagatttcgaggaaagttttaaattattcaggcggaaatcacctgaaccggatttatataccaaattaatgctaccgtcttcgttaccggttattgttgcgctggattgatcgcccaacaaatagtctgagaacatatcgcattcaccgactgaatatccattataagtgccggcaatttcctttgcaagatttatatcgttgtcgtcaccgcaagaaacaaatgttgttgaaaatgatagtgccataagagcaactgtccaaaagtttaaaattttcatacttaatattgatagataatgattaataaatttttcagttgcaaaggtacggggaactgaaatgtggaaaaatacccaaaagaaatgaaaaagagttgagacgttaatcatatgtaggtattataaaaagtttgaaccaattcttttcactttggaatttgaaaatgaggaaatcacggctttttcatttaagctttgaattagtcgttcgattctcctacccatgccactgcggcatgaggggaaatcccgttattggtaatcactaatttacgaatatctcaaatctgaatttttctcatttttgagctggaaaatgtaacacgtcagtgaagcttactgatagtccccttattatctcagcgtgcgtgaataatctgcttttcttctggaatacttgacaaacgactttttattttgtatctttgaagaaataaaagtgataaatagcatgagtgatataagaaaaatagatacataaatagcattcagactgatatgttttagtatcaggatagatatgatatagggcaatagtctaacgattattgccctattttgtttgtatttttgcgcaaaacatttaatccatttccgaaaaacgaaaaaaatagtttttaataaactctgataccgtttataataaactatccaaaagtttattataaacagaaatcaagtttattaatattggaatagctggttgtaaaaataggaaaaactgtattatagagtagaggagcatcgataagcgcattcgtttacaaagtaatataagataacattttccatttcttccaaatatgcagagaattcaaaccgtcaacacaaggagatagtatcccgtcaaaaatgaacgataagaagaaacacctatggtgatgtttccgcatcgctgcgcacgaatataaggatttttactacaataacgagcgacgaacaatatttcttaaatgaaaaagccgtgtgaggaaatcacttgtaagatggaatgttgtgcggattgaaataaaatccgtacctttgcgcccttaaaactaactaacctttatttttatgtttactgacttgttgcactcctcttatttttcccttttcctgattgtcgcgttgggatttatgctgggaagagttaaaattaaggggttatctcttgatgtgtcggcggtaatctttatcgcacttcttttcgggcactttggcgtcatcattcccaaagaattgggaaatttcggtttggtactttttatttttactatcggtattcaggcaggacccggattcttcgattctttccgtagtaaggggaagacgttgattctcattactatgcttatcatttgttccgcctgtctcacggcggtaggactgaagtatgcgttcgacattgatactcccagtgtggtaggtctgattgccggagcattaaccagtacgccgggtttagccgtcgctattgacagtacacactcacctttggcttccattgcttacggtatcgcatatccgtttggagttatcggtgtgattttgtttgttaagctgctgcctaaaatcatgcgggtggacttggataaagaagcacgtcgcctggagatagaacgtcgtggacaattccctgaattgattacctgcatctatcgtatcactaattcaaacgtattcaaccgcagtctgatgcagattaatgctcgaggaatgacaggagctgttatttctcgtttgaaacatagtgatgaaatatctattcctactgcttctaccgtgttgcacgaaggagactatatacaagcagtaggtagcgaagaatcactaaatcaactcgcagtgctggtaggcgagcgtgaagaaggcgaacttcctttggataaaacacaggaaatagagtctttgttattgaccaaaaaggacatgataaacaagcaattgggggatttgaatttacagaaaaactttggttgcacagtgacccgtattcgtcgaagtggtattgatttatccccgtcgcctgatttggctttgaaattcggcgataagttaatggttgtgggagagaaagaaggacttaaaggtatagcccgcctactgggaaataatgcgaagaaattgtcggatacagacttcttcccgattgcaatggggattgtactgggagtgttgtttggcaaaataaatatctctttctccgaaagtctgtcattctcaccgggattgaccggaggtgtcctaatggtagctctcgtactgagtgcgatcggtaagacaggacctattatttggtctatgtcgggacctgccaatcagttgctgcgccaattagggctgcttcttttcttagccgaagtaggtacttctgccggaaaaaatctcgtagctacttttcaggaaagcgggctactgatgttcggtgtaggagcagccattactttggtgccgatgcttattgcaacagttgtggggcgtctgatatttaaaattagtttactcgatttgctgggaactatcaccggtggtatgacaagtacgcccggtctggctgctgccgattcaatggtagacagtaatattcccagtgtggcatacgcaacagtttatccgattgctatggtattcctgattctgtttatacaaatgatagcttcagccgtatattaacagtattctgtctgaaaattgattgttaaaaaaaaagtttgtatctttgccgtcctaaagtagaaatgagttgaaacgattgttactgaatataacgcactatttcttgccgatactttttgtatcgtatctggtaagccttacattctttgcccacgtacatgtggtcaatggcgtgacaatcgtccattcacacccgtttaagaaagggacggcacatgaacattcaacagtcgagctgatacatattcatttcctgtctcatctgacgacggacggtgcggctgttatttttgctctttctcttttcatcccttttttattgtgtctgttgttcggtcgtccacagcatacacattctcatgctccatatcatggagtgattgcactccgggcaccgcctgcgattcgtttttcagttatttagctgatgatattctgccttgtttgaggctgggtattgtctgatttttcatgtgaatacttaacgaagaacgaattataaacgaaaaatgaaaaaatacatattttcgcttgtctgcttgtgctgtgcattgttgcctgctcttgaaggacaagctgctcttcacgagcatcctgagtatccggaattgcgtaaatcggatgcgaatattgttggtcatatccttgataaaaatacaaaagaacatttgccctatattactattgctctgaaaggaacaacaatcggtactgtaaccgacgtaaccggacattatttcctgaagaaccttcccgaaggaaatttcgtacttgaagttagctctgtaggttataaaacggtgaggcggaatgtgaccttgaagaagggacatacgctggaggaagattttgaaatagaagaagatgcggtagcattggacggtgtcgttgtttctgccaatcgcaatgaaacaacccgtcgtttggcaccgacattggtgaatgttgtcgatctgaaaatctttgagaataccaattcgacaactttagcacaaggactgaattttcagccgggagttcgcgtagaatccaattgtcagaactgtggcttccagcaggtacgtatcaatggactggacggtccttatacacaaatcctgctggattctcgtcctatcttcagtgcactttccggagtatatggcatcgaacagattcctgccagcatgattgaacgtgtggaagtgatgcgcggaggtggttcggcgttgttcggttcgtctgctattgcaggtacaatcaatatcatcacgaaggagccgattcgtaattcgggtatgttgtcgcatactattactgggattggcgacggtgacgcttttgataacagtacagcattgaatgcctcactggtgacggatgaccagcgtgcaggtttatatatcttcggtcagaaccgtcatcggtcggcgtatgaccatgacggagatggatattcggaaataccgaagatacacgggcaaacggtcggtttccgttctttcctgaagacaactacttattccaaattgactttcgaatatcatcacatggaagaattccgtagaggaggagatatgctcaaccgtccgcctcatgaagcgaatgtggctgagcagacagagcattctatcaatggtggtggtatgaagttcgattatttctcgcctgacgagaaacaccgtttcaatgtattcgcatctgcgcaacatatcaatcgcgacagctattatggaggtgggcaggacccgaatgcttacggaaacactactgacctaaattggatggcaggctcacaatatgtttacagctttggtaaatgtattttcatgccttctgattttactgccggagtggaatttaatcaggacaaactggaagacaatatgtggggatacaaccgtacggtagatcagaaagtaaatatcggtagtgctttcgtacaaaacgaatggaagaatgatcgttggggatttttgctcggaggtcgttttgataaacataacctgatagatcatctcattttcagtccccgtgccaatctgcggttcaatccgaccaaggatatcaatcttcgtttgagttattcatccggtttccgagctccccaggcttttgatgaggatttgcacgtagaaaatgtaggtggtaaagtagcaatgattgaacttgctgataatctgaaagaagaaagatctcagagtttgagtgcttctgcggatgtttatcggcgttttggcgcttttcagataaacttcctgattgaaggattctatactaaattatcagatgtctttgctcttaccgacggcgaagttgtagacggagttctgatacgtacacgtcataatgcaccgggagctcgggtaatgggacttacattggagggaaaaatggcttatctgaataaattccagattcaggcaggggtaactctgcaacagagtcattacagtgaaccgcatacgtggaataaggacgcaccggcagtaaagaaaatgatgcgcacacctaacacttatggctatttcacagcaacctatacaccgataaagccgttatccattgcgctttcgggtacatataccggttcaatgctggttcctcacgagccagtccccggattccttgagaacccgattacggtgaatacaaaagatttctttgatataggtttaaaggcggcttatgattttaaactttataaatcaatgaatctccagataaatgctggcatacagaatatcttcaatgcttatcaggatgactttgataaaggtgcagatcgtgactctggttatatttacggcccgtcactgccgagaagtttttttgcgggagtaaagattagctattaataatggtttaataattcttttaagctctgaaatcgtcataaatggggattgttcggatataaaacaatccctatctttgtttcgcagaaaacgctattgtttttgttacacaaaactaacgaatgagacaactgtatcggaatataataaagttttttctgcctgtactatttatttcgtacatggcagggattactttgtttactcactctcatgtagtaaacggggttacaattgtccactcacatccttttaagaagggcaccgaacacaatcacacgacagtcgagtttcagttacttcatctattgaaccaagtgttggtgacagatagcgggttattacctatatttgttgtttccgttttatcattattatgtattcttcttattcgtccgcaaggtgcgtgttattgccggtcttgtccgggtgttgtctctcttagggcacctcctgtcccttagtctacatttatcgaaattgctatttatttttagaaacagtacttattattgtttccgtttcctttattactttctgaatttaaacgattaaaagactaacgacaatgaagaaatatctattagtcctggtcagcctatgctgtgtcttatcggccgcattcgctgagaatccggattaccctgagctgaaaaaatctgatgcaaatattatcggtcatgtattggataaaaagacgaaagaacatttgccttatattacagtcgcactgaaaggcactacgataggaactgtgactgatgcaaccgggcattattttctgaagaacctgccggaaggtagctttgttctcgaagtgagttcagttggctataaaacacttactcgcaacgttaccctgaagagaggaaagacattagaggaagattttgaaatagaagaagatgcgatcgctttagacggagtggtggtttctgccaatcgcagtgaaacgactcggcgtctggctccgactttggtcaatgttgttgatttgaaactttttgaaacgactaattcttcaactctgtcgcagggattgaacttccaacccggtgtccgtgtagaaacaaactgccagaattgtggtttccagcaagtccgtatcaatggtttggacgggccttatacgcagatattgattgattcgcgtcctgtgttcagcgctctttcgggagtatacgggttggagcagattcctgccagtatgattgagcgagtagaggtcatgcgtgggggaggatcagccttgttcggctcttcagccattgctggaacaattaatatcattacgaaggaacctttacgtaactccggtcagttgtcgcataccattacttctgtcggaggaagttcctcgtttgataataacacatcgttgaatgcttctttggtgactgacgatcatcgtgcgggattgtatattttcggacaaaaccgtcatcggtccggatatgactatgacggcgacggatttacagaacttcctgaattgaagaatcaaacagtcggtttccgttcttatctgaagacaagtacatattcaaagttgacattcgaatatcaccatatgcaggagtttcgccggggtggggatatgttggaccgtccacctcacgaagcccatattgcggagcagttacaacattcgatagacggcgggagtttgaaatatgattatttctcaccaaatgaaaagaatcgtctgagtatcttcgcgtcggctgccaatacagaccgtgacagttattacggtcccgggaatgaccctctcaaagcatacggaaagacaacagaccttattgctatggggggtgcccaatacgtacatacgtttgataaatgtcttttcatgccttccgatctcactgcgggacttgaatacaaccgtgaccggctgaaagataatatgtggggatacgatcgtcatacggatcagacagtgaatatttacagcgccttcctgcaaaatgagtggaagaatgaacgctggagtattttggtcggaggacgtctcgataaacataatatggtagataatatcatttttagcccacgtgccaatttgcgctttaatcctacgcagaatatcaacttgcgtttgagttattcttccggttttcgtgctcctcaggcttttgatgaggatatgcatattgaaaatgtaggtggaactgttgccatgattgaacgggcgaagaatctgaaggaagagaagtcgcagagttttagtgcatccgcagatatctatcatcgttttggcgcttttcagactaattttctgatagaaggattctacacaaaactgacagatgtctttgtgctgggtgaaccttataatcgtggagacggtgttctggtgaaattacgtagtaatggtccgggtgccaaagtagtgggggtaacgctggaagggaaactggcttatctttccttgttgcaagtacaggcaggattgacattgcagcgtagccgatatgatgaaccgcataagtggcatgatgatgtgcctgccaagaggacgattttccgtactcccaatgtgtatggctatttcaccgctacctatattccgattaaacctttatcaatagccttgtcaggtacatatactggtagtatgtttgtgcaacgcatggatattacagccaaaaatgctgcaatgggtgatatgcccgaacgaaaagcggaagctgttaaaactccgaagttcttagatttgggcgtgaaacttgcttatgactttaaattatataaaacagttgatttacaacttagcggtggtgttcagaatattttggaagcctatcagaaagattttgatagaggagcaaaccgtgattccggctatatctatggtcccgcactgccgagaagtttttttgcaggagtgaagattagctattaaaacagtgtataaaagatttgtctccagataaacatatataaaaaacagctttcatttttcatatccgcaaaatgaaagctgttattattctagtaagaaggcagagtcaatgattgcaaacctttgtgatatctacggtaaaaccttcatcggtagacataaacttacctttcatcttgagaaactctataagttcatcaatatccatattttctgccgaacaagtatagaagcgttgatcttctccgaacttttcaataattgccttctttaatgatgattctgagtaactattacctttcatcatgtgaaggacttcatgagcatgtaattgttccataatctatttttttgcaaagataatacgggcatatagattaaaactgtaacatatgtgacaaaggtcaattatatctattaattatggtttatttattgttttttcgaccatatctttatctattccgaatttttcatttgtctggcattcaccggcaggttctacgtgtacaagaatgtcataaacgttatctatggaactttttatgcttttttccaccgattctgcaatctcatgggcttgtgtgatggtaatttgtggattaacctctatatcgagggtaatcatataaagattccctatcattcttgaccttacacggtgcgggttgcttgcgccggggacttcctctacggcttcaaagatcttgttatatacattcacatctttaacaccgtccattagttcgacattagaatcaataaagatactgacagacgattttataataaagagactgattattaatcctgtgattgaatcgagtatcggtagtttgaatataaaggtaaagaccagtcctaccaaaactccggatgaaataataacatcattacgcatattgatcgcatttgctgtcagtaaagagctatcaattctctttccttgtttatactgatacagggccagcaagagctttccaatgatagagaatacagtaacatatatcgcaatagccgaaggaacctcttttgttgcatccgaaaagatgttggcaacggaggataacaacatttgcataccggcataaaatattacgagcgacaggattttggttgcgattccttccgctttctcatagccgaatacatacttttttgaaggtgggcggttcatgatgcgtgcagtgaaaatcattacgatagagatgattacatcggttgccgaatcaataccgtcaccgagtacagccaaactgcctgcaaataatccgacaatgatttttgatgcggaaagtatggcgttgccaattgtacttacccaggaagttctgattaatattttctctcgtgacatataattactatgtttatgaagcgaatatatattattttataatactgaccctcatattgttctttttattatcataatttgatatgtgagaggacatgaaatctaataaatcactataatctttctttctccttttagtagtttggatgttttagttgtattatatatagacagtcaattaaaacaagacattaacccataaatagttagcctttatgttcaaaaaattaagtacctctctgctgatagtattagcttatgttttatactcatgcacatctgccgtcaggcaagagattgccattttacctactcccgttaatttaatggaacagtcagtcagttttgtctttagagatgagatgaagaatacttcctgcctatagagagaaagattgtgaagcctgctgatattctcagaatggcaatttgtcactcaacaaggtaaatagttctcgccttggagtataggctttgaattgttcttgttgttgagtcataacgttgctttttgttagtttgttgttgagcgaatcgtttcttggtataacaagtttccattggaaaacgtttctccgattatctgtctttttagaaacgattctgctcggtacaaactacatacaaacaaagcttacaaagccaaagttatcttttaaacagcaatcttaatacctctttttttgttgcaatagcgtttgcattgctggcaaagatcatatcccagcattgttcctaaaatgaaatcttcttcagctgtcaattgatttaaaggacgagtgataatatgtcgcatagcttccatacattcgggtttaccaaaaaacaggttgattttattagtacttatctcctgtatcatatagctgatgttttggttcttcaaccggcgcacggcaaagtcttcatgttctttactcattgtataaagtaccatgttacgtatacctttcttaaactcataaatatgattgaggaaaatccggatttcaccgggaatgattcttttggtagccatgatgcaaacaattgtttatattaaggtaaaggttagcttatttcttgttttacttgttcagcccatgcactgatacgttcctctgtctgattgtcttcgttgacttcatcaattggaagtccgacaaatttgccgtctacgaccgctatggaagaatcgaatgtgtatccagccgtatctactgctccgcagaatttgcaatgcgtgtctttcaggtcttcataaataatcccgatggcatcgcagaatgtatcgctatatgagtcggaatcaccgcaaccgaacaaggctacatatttatgagacaaatcgcatttctttaaaacatttactccgtcataccaatcgtcttgcagttcgccggctccccaagtagagctgcctagcacaagtacatcatactcattgactaaagcctctgtaagtttagatacttcaaaaatatgtgcggaaggaacatttagtttctctgcaattcgacgggcgacgtcttcggttgttccggttgtggaaccataaaatactccaattttattcatctttgatatttttttaatgtgatgctgcaaagatagggtaccttgtagaaatagaaaatccctattaataatggaataatagtctcattctcatcataagtggggataaaataactatgttttttgatacttttatttaaaatagctatctttgggtcgatcaaaacaaacattatatgaatatgagaaatttaaagtatttttcttttggaatcatcagtctgattttcgcttcatgtatagaagaaaaaaacttatctattcagaatgaggaagaactggaaaatgcagaacttggtttatctacagatttttctctaaaaacagagaggagcatatctattactgctactgacggagaaggaaaaacacagaaaggggtaaaaatggggatatttgcaagtcaaccttacacgggcgaaggaattatctctgtcgaacctatttttgttggatatacagatgcttccggtaaattgaatgcggatgtagtcgtcgccaataatctttctaaagtctttgttgctccacttactgcaggatatgggcaggtgcaggaagtggatgtacggaatgttagctcattaaattttcgtggagttgctttcccgcaggctgctactgtgactcgtgctgctgcagatgaaattccacagatttttggtccaatcagcgggctttatcaattatttattccttataaaaatgacgaagtgaatgagaatggtatacctgttcagggaggttgctcgttggtgtcaaaagaacaactttctccggcattgattaataagattgatagttggtatccggaaaaaaagaatgttcagacagcggatttatcaaagaattctgatttgagaattgttgatgaggacggagctcaggtttgggtgacttatgttggagacggtggtttctgtgtggataatcaaactgtttataattcattgctatattataattataaagagggggatttaaaaagtgatgtttataaacttcacatgactatgttactgcctaatacaaatcagttgcaatgtccgtcaggcttaaaagttcagttgctttattgggatggctcgaaatatagtaaggtttttccaaatggtacacgaatcgggtttgccgttgcgcgtgccggatttaagaaagacggtactgctataacagataaacttgcatatagttttaagaatacgatgagtcctgccgttaatggggatgtgaatggaatgtattactctactccagaattgaatacatggggtaaaactcaagcagtaactcgtgaattggacggctataattgttgtgtgacaggttttgatatccgtccttttggagacaggaaggctgattatgatttcaatgatgtaatggtaaaggtaacggctactcctgaaaaagctattaggccgggtgaagatattccagttgatgaagatgtgactgtggctgaatcaattcatggtacgttagctttcgaagatcaatggcctaatcccggtgattatgatttaaatgactttgtagtgaactatacatatggtgtctataaaaatgtggataataaaattaacggtatccaaatgcggtttagaccgattgctaagggtgcggcaagttatacaaaaattggttttgggatagaactaccgttggcttcgaatgatattgatgtagcagaagtagagggagctattttagaaagtggagactcaaacgctactttcattatttgggaagatataagtaaaccttttgctggtggtgaaacaggttttatcaatacagaaaaaggctcttcttttgtttcggcagaagagttggttgtgactatcccattaaaagcagtaactagcaatgtttctatgatgaagtttaatccgtttatatttgtcaataagcgttcgcatgagattcatttaacggattttgctccgacatcaaaaatggatatgaatttgttgggaaacgggaaagattgttcggatgtatcgaaaggtttttatttccgaatgaaagatatgtattgttgggcattggattttccacgaacttctgcagatgaagcggcatggagatatccgaaagaaaaatcatcagtggtaaaagcttataagaattacaataaatgggtaacaaacaagacagatttatcttggtttgactctactattccgggtaatgtagatggaagtgaattgtattaatctgttttgataataagttaataaataaggggctgctttttgaggcagccccttatttattaactatgttttttaatggtggaataaacgaattcctgtaaatgccattgccatattatatttgtcgcaagtgctgataacatggtcgtcgcgtacagaaccacccggctgtgctatgtagctgacgccgctcttatgtgctcgttcgatgttatctccaaaggggaagaaagcgtctgatcccaaagatactcctgtcattgtgttcaaccatgcacgtttttcttcgcgagtcagtacttccggtttttcagtgaaaaactgttgccatatgccgtctgctaatacatcatcataatcttctgatatgtatatatcaatcgtattgtcacggtctgcacgacggattttttcaatccaaggcaggttcatcactttcggatgttggcgtagataccagatgtctgctttatttccggcgaggcgtgtgcaatgaatacgtgactgctgtccggcgccaatgccgatagcctgtccgtctttagcataacatacagagttggattgcgtatattttaaagtgattaaagcaataatcaaatcacgttttgcatcggcaggaattacttgattctgtgtcggcatttctttcaaaagactttcgtcaattttcagttcgtttcttccctgttcgaaggttatgccgaaaacatctttgtgttcaatagaatccggacgataagccggatctattttgattacattgtatgtaccttttctcttgtttttgagaatttccaatgcttcgggagtataatccggagcaatcacaccgtcagatacttcacgattaataaggcgtgcggtttcttcgtcacaggtatcggacaatgcgatgaaatctccatacgacgacatacggtcggcaccacgtgcgcgtgcataggcggtggctaatggggacaacttcacatcatctacaaaataaatctttttgagtgtatcattcatttccactgcaacggcagcgccggctggacttacatgcttaaaggaagcggcagccggtagcctggtagcttcttttagctctttcactaactgccaactgttgaatgcatccaacagattaatataaccgggacgtccgttcagtacttcaatggggagttcgccgtccttcatgaaaatacgggcaggcttttggttagggttgcagccgtatttcagttcgagttcgtttgccatatcactttaattataaattactaattacaatttaatagcgacaaaattactaaaaaaagagtagccagcctaaactcctgttagaaattactagcatataattagtatttagtaatccgtaattaattgaaatacctataaatggtgattgtatttccgtgaaatattccgtttctttgcagtatctaaacataaataggtataaatggataatttacagaaatataaaccaaccgataagatgattgatcttatcagtgataactattctttgttgcaagtgatgagtcgtttcggactttcgttgggatttggtgataaaacggtcaaagaagtttgtgaacttaacggagtagactgtcggacttttcttattgttgtcaactttatagctgaaggtttttcccggttggatggagatgacggagaaatttccattccaggattgatagattatctgcgtcaggcgcatatttattttcttgatttctcccttcccgctattcgtcgtaaactgattgaagcgatagactgttctcaggatgatgtcgcttttcttattctcaaattcttcgatgaatatacaagggaggtgcgcaagcacatggattatgaagaaaaaacagtgtttaagtatgtggatttactgattaaaggggatgctcctaaaaactaccagatcagtacgttctctaagcatcatgatcaagtaggggagaagttgacagaactgaaaaatatcataattaaatattgccctgccaaggcgaacgaaaatttgctgaatgcagccctttttgatatttatgcttgtgaggcgggattggaatcccattgcaaggttgaagattatatttttgttcctgccattctgaagttggaaaggaggataagagaaaatgaaaaataacgaagttattcgaatagccattgcagaaacttctgtaattattcgtggaggactgactgcggcattgaaacgtcttcctaatgcaaaggtgcagccaatagagttactttctgctgaggctttgcatgattgcttgcggacacaatgccctgaaatgttgattgtaaatccgacttttggcgattattttgacgtaaataagttccgggaagaagtatctggcaaaaagatacgtttgatagcattggtcacttcttttgtggatgcttcattgctaagtaagtatgacgagtcgatctccatattcgatgatctggaaactctttccaagaaaattgccggtttgttggatatgtcttcggaagaggatgaagtggatagtcaggacgcacttagccaacgggagaaagagattgtgatctgtgtggtaaaaggtatgactaataaagaaattgcggaaaaattgtttttatcgattcatacagtgattactcaccggaggaatattagcaaaaaattgcaaatacacagtgcagctggtctgactatctatgctattgtaaataagctggttacgcttagcgatgtgaaagatttgtaactactgaaagtgttataaaacacaaaaccgtttgcgtacacgaaaatatttcgtacctttgcagtgcagttgagaaactgttagtttataaggtaaaagaaaaaggttaaaggtattagatttgacaatttaaggtattaatggttttagttcaataggaaaagttttaatagaaggtaaaaggataacgataggtaacacgtttttaggtaaaaagaagattagttttcaggaaaaaagaggtaatgagaagaaaagcccccaaaggcttttctgatgcgaggcgagtggttccatagaaggaattagctcgtttttttatttggggaacagattaacggagttatgtttcctgattaataaaacctaaagtctgtgtaatctgtgcttaaaacaaaaacaaaatcccgacgaaatcgcttcggcgggactctatttcatttttacttaaatgtggctacgtaataaaattatgactaattaattcaattctgatactgcaaagataaagcgtttcagtgggtgtcacaatcacctttatgaggtatattgcgtagctattctcactatttataattaccggatactgttttttccacctttttccattcttttgtttcaaaatcataggttttgataacttttgcaggacatccggcacatatagaataggaaggtacggaatggctgactacgcttccggcagctactacacagtgcttccctaaagttactcctggaagaataactgagttagcgcctacccatacgtcatcttcaataacaacgggctgtgtgttgaccccttgttcgtcgatcatctttttcacatcctgataattatgattgagtcctgttacggtcacattttgggctagattaacgtgattgccgatattggccggacctataatcgtatttcttaatccgacacgggtataatctccgatagtcaaatcaccaactgcattattaaggcaggagaaatcttcaaccacagaatattttcctaaaaagaaatggttgaaaggaggaagatctttgcgtacactccgatagatcacagagccttttccgcgtttcaggtagatgaaatcaaagaggcgtatccaccagtttggacgagttttgacaggatgcataataagccgatacactgcttgctttaaactgggtttttctttaattcgttgcttaaatgtctttttctccatattgaatgttttttctttttgtcttccaccaaataatccggaatagccagactataagtaactagtaggccgaagagtataagccaccagccgatagataatgcccagttatatcctgtaatcagcaatgtccatacactgacgaagatacacatttttagcggagaaggtattagatgctgtactattcggttacagaaattccagttcccttccaaaagcgaagggaaaaaataagaggctgtctttcggaggcgtctcctatatgggtgaaccggacttgattgacagtatacaatagcatccggaaggtagtcaatatatacattcttctgaaataacttccgttcgatattggttttagagcttctcagattgttttgcaaccatcccaagtcgatagccatattggttccggataagttagacgacagtccgaattgtgtatttccagctctgaaaaggctgttctttatttctttgcatatagcacggaaacgattacagaaacctttgcgattttcaataactgtgtgtaattgaatggcttgtattccggcatcatacgcattgtagattttctccagaaagagtggagacagagaaatggctgtgtttgataagataaggaccagttgatagtgttctctgtcaagagtattgattccttgatgcaaatcattgtatgtgaagaattcgtaagattcttcacgatagattacgggaagcggactttcttccggaacgaggatagcacaatggtatttcttttcagcttttggatagacaatgcgcttgaagtgcgatgcaactgccaatacaaagaggtatagaataacaatccccacgaagaagaataccaggtcatctattatgtaaatgtaggtgctcatcgtctgtaaaaggttatacgttctctttttgaataaatgcagtaactgttttcagaataattttgatgtccaaccagaaagagaatgtctttgcatacttgatatccaactgtttgcgttcttccgcagataacttgccggcttcacctcttttttctacttgccatagcccggtaagtcctgccggtcccataaagcggtcgatatgttcatcactagttagtaattcggcttcgtagagtgggagagggcgattacctactatggacatatctccttttaagatattaataagctgtggtaattcgtcaatactatatttacgaatgaagcgccctatcttcgttattctaggatcattttccaacttgacaaaagcattacttttctctttcgattttttgtgaatataatcttcttcggaaataacgaaatcatcagatatcaggagaatttcttcttcgtccactttttgaatttcttcggtctcttgctcttctccccaaatatcttcctcttgctgatactggttgagcgtattgaaatccttcaaatgtttgtcggcatcggtatacatggaccgaaatttgagaaaatcaaaaatcagataattgcttcctacacgtttggatttgtaaataataggacctttgctttctaggcggatagccagtgctgtgagtatgagaagtggggaaagacataacaatgccattcctgaaaagacgatatcaaaagctcttttccataaaggtaggcggaaagcattcaagttttgcgtcttgagttgaagtgcctgtatcttttgatcttttctatgtttcaggaaggttgacagagcctgcaaggattccggattcgtttcgtatttaatggtattatttataccggctttgagatattctggagcttcttctttagataaagaatcaatgacgagtaccatataaagtcccggatactttttgcgcatataatgaatatttgcaatatcttgggatagatttatctgttcgaaaaacagagctgtatcgtatttttcccgtatcttgtctagtaccttaattgcttgattacaattagatgctgcataaaatacccctatgctaagtttagagaataggtttatagtcttgctatctttgcctatgtaaacaaaatattgcatatagaggatctggtgttaatcgataatctttttgattcgaattttgagttctagtggattgaatggctttaaaatataatcttccgctccttcttccagcaatctgattctttcggttgtactttcttcactagataacataacgataggtattgacttgaataactcgttatttttcatatatcttagaaattcgtcacctgtcattaacggcatacggatgtctgaaatgataagatcaggtacgttaccttcattcagccattctattgctttaatgggatcttccaaataggtaaaatcataatccttacctaggtatataccggcaacttttccaatagtcgctttatcatcgactagtaatatttttttcttcatacgaatagacctttctatcgcttgctttgttattgatttatagattagcttactgtcacagattatttatgacagtttgcaaatatagatattattttagaataatctctcaatattgacaagtaaaattcgtgatatatatttattttatctaataaatctctcagtgcgatgttctaatagaaaaacacggatttcatcaatatgaaatccgtgttatcaataaatatttggttgttatttgtacactttagatgaatcgaatgttttccaccattcctgattcttaacaccaccgctagttacccaatctgtaaacaaggaataaacagtttttatatttacatattctaaagcccacttgaagtcagtagggaccatgattccccatgccagattgtctttactgatgtaatatttcttaccggaaacagaactattatcattatttcctccaaataaatcagtattagctagtttggttggttgatagccgataacatgaatttctttacgattatttctatttccttccacaaaaatgaaaacattcagtttgttgatgtttaattcatccggagaaatcggattgctgagttttatggtgaaactgatgttcttaacattcgtattgtttgaatgattggcaaaggtgttaatttgttcataccgatctcttcccaatgctttgtgcgcatcgtcgaataacggaataactgcataatcttgtccgttctcaatcttattactgttcaggttgaagcttttgataagagagttgtcactaaattcaacaggttgcataattgcactggcaggaacaccgtccaacatgatagcagctccaatacttttagtagctccggtagcggctaaatcgatgcttaatttgaattcttccactttattattcttattgagagaaatcgttctttctttgataatcatgactaaatcattcatatcatagtctccatataatggccattgatcttcaaataaatatgcataattatgtgtatcatccactatgatcgggaatttaggttcctctggttcttctcccttatttccttcgttctttgttcctgtacaaacttcgatagttactttggattctcctatttttgtaatatatgcgccgttctgtacatgaaaattagtccaatgtggacttttctctacatgattatctgattcaatagccaaattgccatcataagtaaatccttgaccggctataatgggagattttatcatagaggtgttttcaccttttccatagaacgtagcataaccaggaggtatatccagtcttgtagttgcttccagcatagagccgttattcaagttaacaactccgttttggaactccattttaggtgccttgatatatccttgggttaagtttaacttaattccgtttgcgtagaaggaaatagtggcttccatactacaactattgttgacggtaggattagtgaaactgatcgtctcaaaaatgattatatttttgtttgtgataacagcatctgagtttgcaatcattttttttccataaatctctccgttattttctaatgagaaattagacggaaggttaaactctccttcaagttcaatcttattgtcgttgataatttgggtatttgaattaattgctatgtccttgcttgttatagtacctccgttgtagagtgtagctcccgaatgtaatgtcatagtgtttgtaactgatacattaccccagtttcttaatgccgcaggtgctccgttagtaaatgatatattttcggcttcaacgtttccttcatccatgacagtcagcatggagtttcttataaaagtcatcactccggatgcttttattttagcattgtccataactatgatttcaataccattctggaactggaatgtagtcggaattgtccatgttgcatcaacgtaaactttggttttaatctcaccgtcatatccgtcaaatttgaatgtaccgttatagtcagaggtaattttataggaagcgtcacgcagtaaagctgttccttgcatttctgtaatttcttttgcttcacttggtatggaagtataaaccggtttctcgggtgaaacagctcttgtggtagcggtacggctcattaacactctgttttgaacagcagattcttgatagtagagtttacaggtaaagttgtcattatcttccggcacatcaaacagatatacctctacacgtcctctgggatcagtctgctttatataaatacctttttgcgtaggtagcagagtgatagcggctgtagctttaaagttattctctttatttgctgtccttgtagccagtacagatgcgttttcattagtaagaggatcttctgtatatatttctactaagtaggaatataaccctccttcttcatctttaacttcgactgtgacattttctgttttgattgtgctccaatcaaaatcatcaggagcagcaaaaccgtttcccattgggttggacgtttcgtaagagggatcatacaaatccttccccgagtcaacacaactaaacaggatacctcccattgctattgcaatgattggcatgaaatgaattgtttttttcatcataattaatattgcttgattgtttgtaaccaaaatctaatgcaaaaatagccgcatgtcttatatttaggctgtattttctgttattttatgtaggaaaaacaattgaatttccgtttcggttctattttagctctagtaggtgcgattaagactttttatatgataagaaatcccttgattttcaaatctacagatatatcagatttgagaatcaaaggattataataatcgaatgggtgtcttaagacttggtgatttctcctattaaacaggagttcattttgtatcgtatatctttgttgggcagtccgtgtcctaatagaaacattagttttgttatagcacattcaggggtactgtcgtatccgctgataacacctgcttccaagagatgcattccggtttcgtaacgtcccatttcgactgctccggaagcacattgggtgatgttgacaatgataatgcctcgttcagtagcctcctttaattgacggataaaccattctttttgcggtgcatttcctgaaccgaaagttttcattaccacagcttttaatccgggaacatgaaggagtgaagttacaatactctcttgaataccagggaaaagggttaaaataaccacattgttatcaaataagtaatgcggctttaacggcttcgtagggtctggtttacgaatgaggttgggctcgtatttaatgtgtatgccaactcgtgccaaaggcgggtaattgaaagagcgaaaagcattaaagttttctgcattgattttggtggtacgattaccacgcatcagatgattttcaaagaaaatgcatacctccggaacgatagcagtgccatccggattttttgcagcagcgatttcaatagcagtgatgagattttctttcccgtctgtacgcaaagttccgataggtagttgggagccggtgaggatcacaggcttactcagattctcaagcataaaacttaaggcggaggctgtatatgccattgtatctgttccgtgaaggatcacaaaaccgtcgaaataatcataattgtaattgatgatttttaccagttttgcccagtaagcaggctccatgtccgaagaatcgataggaggattaaattgataggaggaaatgcgatagttgaatctttttagctcaggaacgtgcttgagcagatgatcgaaattaaagttttctagcgcaccagtttctgggttttctatcattccgatagttccacccgtgtaaattaacaaaacggaaggagtttctgctctcataattgttgaattactgttaaaacgctgacaaagatatagattaattgcgaattatggatagtaaatgataaatttgtttgtattttagcgtaaaatgttataatattgaatatttatgcggatgtatgctaggaattaaaaggaaaagcagggtaagtagctaaagtagtaactacttactcctgattacttctataaacttacttcagtgcttctttcagtttgagaatagctttttccgggtctttttcttcttcgagcagggtgacgaatcgactacctataatagctcctgaagcatgttcgcaggcagcctgaaaagttgccttgttagaaattccgaatcctaccattaatgggttttttagatgcatatcttcaatcttcttgaagtataaccgtttttgttcattgaaatcctgttgagctccggtagtggctgccgatgaaaccatataaatgaatccgtctgtatgtgcatcaatctcacgtacacgttcttcgctggtttcgggggtgataagcataatcactttaatgtcgtaacgttcggcaatgatgcgatagcgttcctggtaatcatggaagggaaggtcaggaataataacaccgtcgattccgcactccacgcatttgcgacagaaattttcgaatccgaactgcataatcgggtttaaatagcccattaatactaatgggatttttacatcccggcggatgttacgtaattgttcaaaaagtacctttagggacattccgttgcgtaatgcttgagttgcggcattttgaatgacaataccgtctgccattgggtcactgaaggggattccgacttcgatcatgctgacaccatgcttttcgagggtacggatcacatcggcagtaccgtccaaagttggatcacctgcacaaaaataaatggaaagtaaatctttcttattgctattgaagagttggttaattctgttcatgactttaaaaaattaaatttatcattttagttcatttaaaaatgtccggattcgtaccggatcttttttccccggttccaattcaaaacggctgttcaggtcgtaaccggcgagacgtggatgtttgaactcctttagtgcgttggcgctgtaagagttgatgcctccgctaagaaggaaaggaaggagaccgttataggtatgcagaatattccagtcgaacaagttaccggagccgccgtattgttcgcatttggtatcgaacaggaaaaggtcacagactttctcatacttatatacatttttcagatctttcggatgggatatagaaaaggctttgataatttttatccccatggaatacaatgatcgacagtattccggtgactcatttccatgtagttgcacatagtttagtccgaaacggtcagcatacatactgacaatctgcttgtcttcgttcacaaaaacaccgacacggtgggtgtggataggcagataagccggaagctcatagacataccggggagatttgggatagaagataaatcccagcatatctatatcttggagcgattctatctcctgtatgttttcggcttcgcgcataccgcatactttgatgatttttccgttgaccataaatcttctgttttgaataattgatttattgtataccttgcaggaaattccctaaggtgtttcccggttgtgtagttctcataaatgtttctccgatcaggaatccccggaatccggctgtttgcagacgttttacagtttgcgggtcggagattccgctttcggataccaatactgcatcttggggaagttgtccggccagccgaaaagagttttccacatcagtgaagaatgttcctaaattccgattgttgattcccaccatatctattttctcattaatataagttaactcctcggaactgtgaatttctagtagtacttccagacctaaatcgtgtgctttcttcacaagttcattgcatttttccggtttcaaagcagcggcaatgagaagtacagcatctgcaccaacaattttagcttgatagagttggtattcgtcaatgataaaatcttttctaagaatcggaatatctaccaaaggacgtgcagcgcgaatgtctttcaagttccctccgaaaaacttctcatccgtgaggatagagagcgcagaggcccccgcagccgcataagccggagctatttcttccggacgagcctcctgctttatccagcctttggacggagaacgacgtttgaactctgctataattcccggagacgaggaaattaatgcctgtttcatggaacgggaagacggcatttcactaattccttcctgcaactgctcgatagaaatcgcctgtttttgcagatctacttcaaatcgtttatttgctatgatttcggataatatatctttcatattttaattattgagttcaataaacttctttaatgtattcagtgcccttccgctttctagtgattcttttgcaagagtgatacattcttcaatagtcttttccggacaaataacatgaatggcaaaagccgaattaactactactacatttttttgagcttcagttgctgtattattcatgatattatcgaaaattttggcagcctctttcggtgtctgaccgccatccaggtcaatgtccctataacgggagaatccgaggctttcgggagtataaatcttttcgttgtcactcgttgctaccttaaattcattcgtcagagaaatttcatcatatccgtccaagctatgaacaacggcaaatttggttttactttcctgataagtataagtatagaggcgtaataacggaagattgtaaactcccaaaagttgataagccggtaatactggatttactaacgggccgagcatattaaaaaaggtacgcacggcaagtcctttgcgaaccggagcgaccgcttttaatgccggattaaacaacggagcgtgcagataagtaatgttacattgttccatgctgcggcgcaactgatctatatcgtcggtgaactttacaccatgttgttccattacgttactggcgccactaacagatgttgctccgtaattaccatgtttcacgaccgggaaacctgctccggctaccgtgaagcaagatgctgtggaaatattgaacgtgtttttcccgtcaccaccggttcctacaatatctatcggcgcaaattcgcttaaatcaaccggaacgcgcatttccaacaatgcgtcgcggaagccgcataattcttcgactgagatattgcgcattagaaagacagtgatgagtgaggccacctgtacatcgttatattttccttgtgcgatattttgtaagatagtacgggcttcatcacgtcccagatattgatgctcgaaaagcttgtatagaatctgtttcataaatttaattgtttaagaagttcttgataatttcttttccttgcggagttaatactgattcggggtggaattgtatcccgtgcacatcataggtcctatggcgcaatgccatgatttgtccttcccggctttctgccgttatttccagacagtcaggaaaatcctcccggctgaccacccaagagtgataacgtcctacgggaatttcttttcccagcccttcgaataatacatcttgtcgtaggatactgaccggggtctgtacaccgtgatatacctctttcagattctccagtcgtgcaccgaaagcctcgccgatagcctgatgtcccagacagacacctaaaatacttttcgtggctgcatactttttgataataggcaacaataaacctgcttcttccgggatacccggcccgggagacaagatgattttatcgaatcgttccacattatcaagtcctatctgatcgttgcggactacttctatgtccgtagcacctaattctttcactgcgtgcaataagttgtaggtgaaagagtcgtaattatctaaaagtaatattttcattttatgattattgtaaaattgttgcttaaacaggttactttattttttctgcttagttctttaattgaacggctaaatcaatcgcctttttcagtgctcccaacttattgttgacttcttgcaattcgtattcatcctgactccgtgccacaataccacctcctgcctgaaaccacaattcattgttgcgactgacgaaggtacggatagttatggcttgattcaattcaccgtttaatccgataaaaccgatacaaccaccgtaagctccgcgattgtgaggttctatttcactaattaactgcatggcacgtactttgggcgcgccgctcaaagtgccggcagggaacgtatcaataaaagtttttatcttgtccgcatcctcgttcaattcaccactgacacggctaaccaagtggatgacatgactgtaatattgtggctctttatagaaaagtacctgtacatcatgacaattacgtgacaagtcgtttctggcaaggtctaccagcataacgtgctccgcattttctttaggatcagccagtaatgcttctgccagttcacggtctttcacgatatcgccactccggcgtgttgttccggcaatcggatcgatataagcatggttgctttcaatcttgcagtgtgtttccggtgaagaaccgaagattcgatatcctccgaaatcgaaatagaaaagataaggggaagggttaatgctgcggagtgcccgatatactttgaaatcatctccggcgtaaggctgaatgaacctccgggaaagaacgatctggaatacatcgccacgcatacagtgcgcaatacctttgcggacgttggctttgtgttcttcatctgtgatagggctggtaacgggacctgtcacagaaaaattgtaagaagcataattccggttttcaatagctgcttccagttccggcaggccgctttcttccccttcggtcaacatctctacgagtgtcaattcatttttgaaatgattgaagacaattatgtatttgtataatatatataataagtccggtgcatcattctgttcatcgtggctctctttaacgggaatatgttcgaagtatttcacggcattgaaagtcgtgtatccataaagtccgcatacattcttattttctccggtcacttggaattgattgatgaatcggttcattgccttttctacggtgaatgttttcgtcagcggttcttccgtgcggctattgtccggatagttggctgtgactataccactgttcacaccgatatttgccagtggacaaagggcgatgaatgacagtgaattttctccggcgtgataatcggaactctccattaatgcagattgcggatacatatcacgcactttcagataaatgctgaccggagtatgcatatctcccaacacctgtttactgtgggtagtataattgaatgttttcattttgattacaaattacaagttacaaattactgtgaactaattgtcctgtttttcttcgttaaaggataaataagtctctatatccttgtcgccacgtccggatacagttaatacgactacatcttccggtttgaatttcaacttttttaaagcgccaagcgcatgagctgattccagtgcggggataattccttcaaacttagtcagttcataagcagcttctatggcttcgtcatcgtttattgccagaacgttggcgcgtctttgtgcggcaagattcgcgtgtatcggtccgatacccggataatcgagtccggcagaaatcgaataaggttcctcaatttgtccgtcttcgttttggataacgtaagtacgtgctccgtggataattcccaatttgccaagttgaatggtagctgcggtcattccggtttctattcccttgcctccggcttctgccaggacgatacctacccgctcatcgttgatataatgataaatagttccggcagcattacttcctcctcctacacaggctatcaggtagtcggggtaatcgcgtccctctttttcttgaagttgctttttgatttcttcactgataacggattgcagacgtgccaccatatccgggtaaggatgaggtcctacagtagaaccgatgatataataagtgtcggcgggatgacagcaccagtcgcggatagcttcgttggtagcgtctttcagtgtcatattcccggaggtgacagggattacggtagctcccagcattttcattttctcaacgttgatgtgctggcgttccacatccgtttttcccatgtatacgatacattccatattcattagtgcacatacggtagcggtagccactccatgttggccggcgccggtttcggcgatgatgcgcttttttcccatgcggcgtgccaatagaatctgtccgatagtgttgttgattttatgggcacctgtatggttcaagtcttcccgtttcagatataatttgcaaccatattttttcgaaaggcgccttgccggatagagtggggaaggacgtcctacgtaatcacgtaacaactgttcgaattctttcttgaattcctcactctcaagtacttcgaggtacttattcttcagttcctctacacatttgtggagaatttccggtacataagcaccgccgaactctccgtaatagccatcctggtcaactaaaaaacttttcataatcctatctatttttatatgttatttttttcgatgtttagaaacgggcaaataaaaaagccctgccgcaagttgcgacagggctctttcaaatctgttatatctttaatgaggtatatacatacgagcgctgctcccttacgactgtcggagttgtaacggacgccaccaccaatatgtatttactaatatagttctcattgtcatttgttatttaacgggagcaaatatagacactttgtttgaaacaacaaacaaaaaatgactttttttcattttccccttcatttttctgatatagaacaattttccccctgatctgttcttataaatactgaatatttaaacagaaaacaattatgaaacagagaaaagtattagtaggtatcgctattgccattttcgttatattattactttattggttgttggtagcagaagatatgaaaccttggttgtcggctatggttccttctcttacgcagcaattcatagcctgattccgacaaggtttcagataattcgtgtatatttgcatgaaacatgaaaagtgaataataaccgaaataataacaatagacaagatatggaaaattttatctttcaaaatcccgtcaaactgataatggggcgcgggatgattgcccgattggcgaaagaaattccgtccgacaaacgtatcatgattacttttggcggtggaagtgtaaagaaaaacggggtatacgatcaggtgaaggaagcactgaagaatcattataccgttgaattttgggggattgaacccaatcctgctatcgaaactctccgcaaagcgattgctttgggaaaagaagagaaggtagattatttattagctgttggtggtggttccgtgattgacggtacaaaattaatctctgccgggttattgtatgacggtgatgcttgggacttggtgcttgccggacgtcccgctacccacactgtacctctttccactgtgttgacgcttcccgctaccggttcggaaatgaacaatggagcagtgatctcacgtcgtgaaaccaaagaaaaatatcctttttattccaactatccgttattctctattcttgatccggaagtaacatttactttacctcctcatcaagtggcttgtggattggcggacacatttgtacatgtcatggaacagtatatgactactcccagacaaagccgtgtcatggaccgttgggcagaaggactcctgcaaactcttatagaaatagctccgaaaatccgtgagaaccagcatgattatcaacttatggctgactttatgctttcggctacaatggcattgaatggatttatagctatgggagtatcgcaggactgggcaactcacatgataggacatgaaatcactgcattgcacgggttgacacacggacatacgctggcgattgtacttcccgctacattgcaagtgcttcgggaagccaaaggagataaacttgtgcaatatggtgagcgcgtatggggaataacttcgggtacaaaagaggaacgaatagatgaggcaatccgctgtacggaacaattcttccgttcattggggttgactacacgcctgcacgaagaaaacatcggccaggagacgattcttgaaattgaacgccgcttcaatgagcgaggagtaaaatatggagaaaatggaaatgtgacaggtgctgtggctcgtaagatattggaaactgcactataatttcttttcctataagaaataataactgccttgtgacttttatcagaaaagtatacagggcagttttttattgttcaatcgtatcgtgtattggcaccccaaagcaatacgggaatatcttgtttgatattaaaatgacgtcatttaaaccaaaaataattttaatttgttttctataagggggaagaaatatctatatttgttcactcaagtttttgatatcatcgaaataaaacattcattttattttattacttatgttgataaccattattattctcgttctttcggctatcttttttgtaaatggtaaaatccgttcggatattgtggcgttatgtgcgctggttgctttacttgtctttcagatattaactcctgatgaagccctttcgggtttctccaattcggtagttattatgatgatcggactgtttgtggtaggaggtgctatttttcaaacagggttggcaaagatgataagttcgcgtattcttaaacttgcgggaacgagtgaaattcgtctgtttctattggtgatgttggtgacttcagctatcggtgcatttgtcagcaataccggaacagtagcgttaatgcttcctattgtggttagtctggcgatgagtgctgggatgaatccgagccgcttgctgatgccgttggcatttgcaagtagtatgggaggcatgatgacattgattggtactccgccgaaccttgtgatacagaacacattaacttcggcaggactcgaaccgctttctttcttctcttttctgcctgttggcattgtttgtgtgattgtcggtacattggtattgatgccgcttagtaaatggtttctgtctaaaaaaggacagaagaatgacagtaaccgttcaggaaaatcgttaaagcagttggtcaatgaatacgggctttccagtaacctgtttcgtttgcaggtgataggggattcccgactcttgggaaaaacgattattgatttggatatacgacgcaaatatggattgaatataatggaagtccgtcgtggggatgcatcgcaacatcgtttcctgaaaactatcacgcagaaatttgcggcaccggatacggttttgcaagtagaagatattctgtatgtgacaggagattttgagaaagtacaactgtttgctgaagattatctgctcgatatattaggtgaccatgctaccgaggaaacgaaaaatacaactagttctcttgatttttatgatataggtattgctgaaatagtattgatgcctgcgtctaatttggtaaaccagacaattaaagaagccggattccgtgataaatataatgtgaacgttttaggtatccgtcgtaaaaaggaatatctgttacaggatttgggaaatgagcatattcatagtggcgacgtgcttttggtacaaggcacttggggaaatatcgcccgtcttagtaaggaagactctgattgggtggtattaggtcagcctttagccgaagctgctaaagtaactttagactataaagctccggtggctgctgctatcatggtgttaatggtgttaatgatggtatttgattttatcccggttgctccggttacggctgttatgattgcgggtatattaatggtactgacagggtgtttccgtaatgtagaggccgcatacaaaacgataaattgggaaagtattgtactcattgcagcaatgttgcctatgtcgttggcattggagaaaacaggagcgtcggagtatatatccaatacattggtgagcggattgggttcctatggaccattggctctgatggcgggtatctattttactacttcattgatgactatgtttatcagtaatacggctactgcggtactgctggcacctattgctttgcaaagtgctatacaaatcggggttagcccgattcctttcctgtttgctgtgacagtgggggcaagtatgtgttttgcttctccattctctacgccgcctaatgcattggtaatgcctgccggacaatatacttttatggattatgtgaaagtaggattaccgttacagattatcatgggaattgtgatgatatttgttttgcctttgatcttccctttttgattgaaaaagaaaaaaacaggaaggctgtattgaaaaatgcagcctttttttatttaatatctgcaaatacagttatctttgcaccgtccatgaccgatgattgagagggttgtggatgtttttgcgcataaataaaacgaactaaagcattaagggattatgaaacaaaacattgcaaaagtattaaccttttctttattggcaacttctgccgtttttatcagttgtgtggataatgagaaaaatctgtttgatgcagaacaactgagacagatttatgaagaaacttttccggtaaagaatatcgatcctgacggagactggactatgtcccgtagtgtaactgcacacgtgacggttaatggagatttaggagaggattatccgatacggatatttgatgcgaatcctttaagtccggaaagtaatgccaaacttttagcagaaggtgttgcaaatagaagtacatcttttaatgttgtaatggattgtgctactgcactcgatagagtatttgtcgcgcgtgtagacagaaaaggacattatcttgtgcaaccgatcgctattgaaaatgaagaggtgaaggcctgtttcggaaataaagaaggtagtactacttgttctatcacgagaactataacagatatacctgctatggcagctccttatacagatgagtatattagtaataaaaaggcctatgctactattattaagtccggctgggatcttggctctggatttgaccagtattctgcctataatcttcctgttttcaaggaaaaggaacgttggtttaagattcaggaagggggctttagggcaagatttactacaggaggaacttggggtggagctaatgccgtgaaagtgattgttcctgaaggaagtacatgggtgattgaaaacgaaaatcaattcagtgatataacggaggtaatagttgaaaatggcggaaaaatagaaataactagaaatgccagtttgatattgactcgggcttcttatataactgtaatgccgggtggtagtattataggtgagggagatatttcaataacaaatagttctaccgggtttagtaattataatgctggtatgattgattgttcccgtttaaatattgatggcggtggaagtggggttgatttcatgaattatggaacgcttaaattgaattcttacaatgcatctacaagcggtacaacactgataaatcacggtgttattgaggctggtagtattaatggtaataacaataccaatgttaagaacggctgttatatgaatgtggcaggaatgtttcagttcggtacacttgtaatggggcatacttctgaagctatttgtggggagttgggttataacggaaataacaatgatattgtgatggaggcacaatcaatactgacctgtacaggtaaagctagtctatataggcatgtagtcggtcccacaacgggaacggctttgttgagaattcatacgattgctaatatttcagggctcattgaatcaaattcgaaagtcacgaataacattatttgtgagataacagatcagacctcttctaatgaaaaagagcaatcactgtggactcctttcgactggttagtatataaaggcttacagaattccgccacttattgcaatccgggaaaagcagattttttgcttcctgctgatgaagatgggtgtataaaagaaggatatggttctgatgatacccccgatgacgtggagattcggaaagccgtttattcctatgctttcgaagataattatcccaaagcaggcgattatgatttcaatgatattgtattgaacgtgactttacccgttaccggtaatgaagtgaaagaattgaaatacgtggttgaccttcaggctgtgggtgccatgaagcaattaggtgccggattaagaatactgggaataaataaaagtaatgtggaaacggttgactttggagccggcgccgctcaacgtgacggttctttgtctgcttcccgtatatttgaagatgcatcttatgagacgactggcagtgaacttgtcattcctttgtttggagatgcacattctgtatatggatataccggaacacaacgtcctatgctgaatactggaaatgcaagtacatctctaacagatatatatactcttgaagtgataatcaaacttaaaaatgccgtatccattcccagtgtaacaaactgtttagacttctttatagcatatcagggcactggtgaaaagagaacggagattcatttgaatcaatttaattcggcaacggcgaatggtcagttggcagataataacgtgcttgaggttatcaaggtagtcaataatacatgggctctttgcgttcctgataaattcgcatatccgacagaaagaactgtgataacagaggcgtatgctaagtttgcggactgggcacatgaccagagtactaataccgattggtataatatgccttcaagtagtgataaagtgatagaatactaaccttttcttttaaatataagtcaaccgccggagaagtttttgttttccggtggtttttgctacgaattaatgctttgattgtaaggtagtagtatttgttttgcatgattttattcgtctgacagttgttgaacattcgtttgacaactgttgtcttttcgtctaacaactgtcagacgaaaagaagacagctgtcagacgaataaattgttgcaaactgaggtataaattctttaacttggagaagtagaattatgcgaaacaggtggtacattcatattctgtgtgtacagactatcaatgataccatcggacaatccgatagtaggtacaataataccggtagcttttacataagtcgccacctcaagaaatatctctgctgccggaacaattacatctgcccgatccggttttagcttgtattgtttgatgcgctgttcggcgggaagtacctgtaatgctaaataaatctcacgtagtgactcaactggtaggagagaagcctttttatcctttttatccgcgagacggaagagtttgttgatatttccccccgaaccgataatgctgacaggcgcatattctgtggcaataccaatcaggtcagtacgtaacgcttctttttcctcctctttcaccatgccgctaagcatacggactgtacctatattatatgaacgggagtttttcagttctccgttactgataagattgatttccgtactaccgccgccaacatctacatatagataattctgtccggaagcaaacagttgctcgatatgattgtcatatacgatatgcgcttcttcctgtccgtcgataatatctacacgaatacccgttttcttggctatttgccggacgatagctttaccgttccgggcatcacgcatagcggacgtggcacaggcgcgataatccactacatcatatattttcattaactgcttgtaagctttcatcagccggatcagtttcttttctttttctgctgaaataatacctgctgtgaaagcgtcttctcctagccgtaacgggatacggatgagttgcaccttactcataagttcgggcgcattttcttcgtttacgcattttatcagtagtcgtacggcattggaaccgatgtcgattgctgcataattaactttcttcatatttatcatcatgtgttcttgtattcgttatataatttttcttgtgaacggaaaagcgatgccatttcttcactaagcgggggagtaaacggaaaattccatatccggttggttcccattccgtctactatgcgtcctttggctgtatcctgaaacccgtaacaaacaatccgttttaaatccgcctgtatctctttgtcataaacaggagccagtacttcgatgcggttgtccagattgcgtggcatccaatctgctgaaccgatataatacctttcttctccggcattagcgaaaatgaaaatacgtgagtgttcaagataacggtcgataattccattgatatgtatattttcactgacacccggaacgcccggtactaaagaacagttgccgcgtacaactagttctatcttgactcctgctgctgaggcttcgtatagcttttcgataagtgcgcggtctgttatgtgatttactttggcaaggatataggcgtcttttccttgttccttgttctttatctccttattgataagggcaatcaaccgtttacgcatatcattgggagaaacgagcaactctttgaaattgacgggagtgtatggcttctcgataaagtcaaatactgcatttacttcccggacaatgggacggtgagttgtcataatggtatagtcggtatacatacgtgcatttccttcgtggaagttgcctgtactgatacagacaatatctccatgtcttgtcccgatgtgcaccagtttggagtgaatcttcagcccttccaccccgaagattacacggattcctgcatcctgcatccttttactccagttgatatttgaggcttcgtcaaaacgtgccagtagttcgatgactaccgtcacttttttaccgttctttgctgcgcaaatcaatgctttaaccactttggagtctttagctagtcggtaaagcgtcatcttgatgcttttcacttctttgctgatagcagcttcgcgcagtacgcggatgaacgtatcaaaactatgataaggataatgtagtgaacggtctttctggtgaatcagggtcagcaggctttctgtaccatttagttcgggtttgaaaatcggttcccaaactggatatttcagatgactgtgtccgcagacaggaaatttcatcaggtctttgaaattatgataacgtccgccggctacgcgggtgtcgttcttgtctatattcagccggtcggtcagtctttttagcaagtccctggggatttgctcgtcatatacaaaacgaagaggttcgcctttcttgcggcttttcactcctttggagattttctgaagtacgccggtccgcaaatcactgtctatttccatttcagcgtctttggtaaatttgaaggtatatgcttcataatccgtatatttcattccgacaaaaatcattggcaggcagtaacggataacatcatcaagaaacattagataggtctttccttccgattcgggtagttggatgaagcgtccgaattccccaacgggcagttggataaccgcgtaatccttctcttttatttttcctgcttcatctttgcggagcaagcggatagccaggtaaatatcttcatctgtctggtcgtccagctgtcggggaccgttaaggaaaagagggttggtggaaccgttcagcttattacgatagaaagaagtgatgaacgctttctgctcatcgttcatttccgtttctttgataacgtagatattctcttttttcagttcttccatgatagaagcgaacgtttcttcaaactgttcatagtaacggttgtgcagtttacctatctgtttcagtgtgtgcgcagcgatttcctgttctttctgtatattcttgtcgtcatactctataatccggtttaaggtagcgacacggacgcggaagaactcgtcaagattgttcgaatagatgccaagaaaagtcagccgttccagtaaaggaacttccgggcgggcagcttcgagtaagatacgttggttgaaatacatccaactgatgtcacgctcaacataagggcacttctttcttgtttcgcttggtttcatgatgaagaatctatttttaattttctgcaaaagtatctaagtgagatgtaatagctataacgattttgttacgaacttattacaatgtttatttgttatttttatatatcagtagaaacacttatattcgcaaaagtattgaaacagacttggttaaaaaatatagaatttatgaaaacaatgaattattcccttattcgtattctctttgcattagtgattggtctggtgttggtgctatggcctaatacagctgccagttatatcgttattacggttggagttgcctttttgattcccggtgttatcagccttttcggctatttcggacgtaagaaatccgaagacggagtttcgccccgttttccgatagaaggagtcggcagtctgcttttcggactttggctgattgtaatgcccgaattttttgcagatgtcctgatgttcttgttaggttttatcctgataatgggaggggtgcagcagatagcttccttgtcaatggctcgtcgttggacacctgttccgggagcattttatctggttcccgctttgattttaattgcgggcatcgttgctttattcaatccgacaggagcacgtaatacagcgtttataattattggtatcagtagcttggtatattcgctttctgaattgataaactggtttaagtttgtacgttgccgtccgaagaacccgatatcacatcacgatgaggatattgaggatgcgaagattattgaataaaataagaaaaagaagagggctacctcacggtacccctccactgcaaacttaaaacaaccaacaaaagaaatagatcatttctactttatgtccgatgaaaacttcttcatcggacattctctttttctatcttacaaataatagttctctgtatttcggaagtgtccacatctggttgtcaacgataagttccaacttgtcgatgtgataacgaatttcttccagtgccggaacaatcgtgtcgtgataagcaatggctttttcacgttcgctttcaatcttgttcgccactttacgcgcttctaccattgcgtctacatgctctttgatgaaggctgtacggtcagcaatttcttcgataagttccagattctttgctgatagtttcgccgctttttctgccggaaacagggattgcattttatagacgttattaatcaaatccgtctgatactgggttgcaaccggtataatgtggttcatagccaagtcacccaatacacgggcttcaatctggatcttcttcgtgtaggtttcccatttcacttcattgcgtgcttccaactctttctttgtcattacaccggtagcttcgaacatggcaattgtttccggtttcaggtagttgtcgaagataacgggaacactcgtttcacaatccagaccacggcgtgcagcctcttctttccattcgtcactgtagccgttgccgtcgaagtgaatggctttacattctttgatatatccgcgaatgatttcaaggatagcggaaactttcggttctcctttttcaattagagcgtccacgtctttcttgaacttcgctaactggtctgctactgcggagttcagcgcaatcattgcagaggcgcagtttgcttcggaacctacggcacggaattcgaaacggtttccggtgaaggcaaaaggagaggtgcggttacggtctgtattgtcaatcaacaattccggtatctgcggaatatccagtttcattccctgtttgccgctaaggctgattaaattgtcttttgtgctgttttcaatatggtctaatacttgcgataactgctttccgaggaaagaagatatgattgcgggaggtgcttcgttggcgcctaagcggtgggcgttggttgcactggagatagaagccttcagtaacccgttatgatgataaactgccattaacgtatttactacaaatgtcacgaaacgcagattgtcttccggtgtcttccccggtcccattaataagattcccgtatcagtacccaatgaccagttgttgtgcttaccggaaccgttgacacctttaaatggtttttcatgaagcaatacacggaaaccgtgtcgacggcttaccttgcgcatcaatgacataatcaataagttatggtcatttgccaggttacattcttcgaatatcggagctaactcgaactgattaggagcaacctcgttgtgacgggtctttacgggaatacccaatttcagagcttcaatttcgagctctttcataaaagcagctacacgggtggggatagcaccgaagtagtggtcttccaactgctggtttttagcactgtcatgtcccattaaggtacgtcctgtcattaataagtcagggcgggcagcatataaaccttcatcaactaaaaaatattcttgttcccagccaaggtaggcaaccacttttttcacttccggattgaaataatggcagacgtctacggctgctttgtctactgcacgtaatgctttcaataatggagctttatagtcaagggcctcgccggtgtatgcaataaacacagtcgggatacaaagagtatcatctacaatgaatgcaggagatgaagggtcccaggcactatatccacgggcttcaaaagtattacggatacctccattcgggaaagaggaagcatccggctcttgctgaacaagtaatttgcccgtaaattcttccatcatgccacctttaccgtcatgttcaacaaaagcatcatgtttttctgccgtaccttcggtcaggggtgcaaaccagtgggtataatgagtgacacccatttcgatagcccattttttcatgccggcagctacttcgtcagcaatgctacggtctagcggagcaccattatcaatagcatcaatcagtgcattatacactttgctgggaaggtatttaaacatcttttccttgttgaacacatacttggcgaaatattccgacggacgttcaacaggagttgctacctcaaccgctttcttcttgaaagcagtctctactactctgaatcttagttttgacataatacctaatttgatttgttgttaaatatgttagagtaaataattacgttctcttatatggttagttgtatgctgattctccgtgttcgtagatatccagcctttcttcttcaactcgtgccggaacgcggagtccgtggactttgtcgagcactttgaagatgatgaatcccatacctgctgccacctcttacatcataataagagaaccattctatgtctgctcaaagccagttctttattcttctcatggcttcaatgcagtcgttacgttcaccgaatgccgtcagacggatatagccttcgccgctggggccaaaacctacaccgggagttccgactacgttggcctcatacaacatctgctcaaagaaccgccatgaagaaaggccattcggggttttcacccataaatagggagcgttgactcctccgtaaactttcaatccgctagcttccagtccttccttcatgattcctgcattggtcatataatagttaatcgtttctttaatctgttcctttccttctgcgctgtaaactgcttctgccgcccgttgagtgatataggaagtgccgttgaacttagtacattggcggcggttccacagtctgttgagtgggattctgtctccttcgagtgttgcggcggtaagttctttggggactacagtgtatccgcaacgcactccggtgaatcctgccgtcttcgaaaaactacggaactcaatggcgcacttcttggctcccttgatttcataaatagagtgggggacatccgcatcctgaatatatgcctcataagcagcgtcgaacaggagtaacgtgtcatttgccaaagcgtaatctacccatttcttcaattccggttttgtcagtgtagtgccagtcgggttattcggatagcagagatagacaatatctatccgtttgtccggaatttcgggtatgaagttattttcacttgtgcaaggcatataagttacattactccacttacctgtttcttcctctaatactccggcacgtccgcacatgacgttactgtctatataaaccggataaatagggtctgtgacgccgacactgttgtcatgacggagaatatctccgatatttccagtatcgctttttgctccgtcgctgatgaatatctctgaagcggagaaatgaataccgcgcggagcaaagtcattttttataattgcttcaattagaaaatcatatccctgttcaggaccatatccgcggaatgtatccttatcggctagttcttctactgctttgtgcattgcttcgatacaagccttgggaagtggctgagtaacatcgccgatacctagccggatgatgtcctgcttgggatgcgttatcctaaaagtatttatcttttttgctatatccgagaataaatagcttcccggtaattttaaaaagtgttcgtttactaatgccatgtggttattgttttaagtttctatcaattattattattaattcttcattttcaacccctcaaccctcgatttcttcaatttctccgtcaaaaactttagttgccggtcccgtcattaatatatggcccgaggcttcatcccattcaatggtgactgtaccaccgtccattattatatcgctttttcttcctgtaagctcgttgatgaaggctgctactgcggtagcacaagcacctgtcccacaggcttgagtaattcccgaacctctttcccatactctcatccgtatagtatctttgcagacaatttgtgcaaactctacattggttctgtcggggaaaagatgatgattctccaattcagggccgatttccggcaaattaatctgggtaatatcatccacgaaagtaaccagatgaggatttcccattgatactctggttgatcggaaaggatatttatcctcaaaatgaacttctcctgtttctaatggactgcccatatctactgtgactgctgtaactgtttttccttctacatgaagtttcagaattttaattcccgacagtgtgtccagagtgatttctgttttatcagtcaagccatattcatatacatatttgcctacacaacggcttccattaccacacatcatcgcttccgaaccgtctgcattgaaaatacgcatactgaaatcagccttatcagagtttccgatcaatataagtccgtcactcccaattcctgtatggaacttgctccattcgattgctttcttttcaggagctgctatcggatagttggtagtgtctacatatatgtagtcatttcctgctccatgcattttagtgaacttaatcttttttgtcattttgacttgtatttgctggttgttgtatccttttgttttattacaacgcaaaggtatgactttttgctttatgttttattgaaatatatatctaatctctatttattttatgtaaactttcaattgtttcgtatatagctatgtttggttataatctgaaattatatatatatgtatattgataaactgttatttaggtgaattgttttgcatatactttcataatatataaagaataattagccttgataatctttaaatttagtcataagaataggaaaaaactcctttttgttttgacgaaatgaaagcggatagctttatttcactatcatattgcttgccggatactctgaagaaccttttcccgtattcattgttctagcactatattaatataaaaatgtagagatatgaatatagagaaacaattagaaacagcagtacgaaccaatcatttggtattggttgtattttatgcggactggtcgcctcattacgaatggatagggccggtactccgtacttatgagaagaggacaatcgaattagtacgagtaaatgttggagaagataaggcaatagccgatgcgcataacatagatactattccggcttttcttttattacataagagaaatgaactctggagacaagttggggagttgacagtggaagaactgaaagatgtattagatgatttcaagtgatcggactgtaatcttttataagtatgcatagaaatatcaatttcttcctcaattaaaaataacgaaaaatgtagtgtattgataattaagttcttatatgtttgcatttttctttaaaagaaaccatacgtttgacaccgagaaatagcccgttccttttaaaggaacgggctgtttcattaatgttgaaggatagagtattgaatgtgtatgttttatttattcttttttagttcttccaacaaaacaaccggctcattggtcgtaatgaaatctactttctgttcaattaaccacttcatttcttcggcttcgtccactgtccacacattgactttcagaccaaggtcatgagcttctttaatccattcgggatgttttttaatcactcccatgtgatagtcaagacccgtagccccgagttcttttaattctttcggagataattcaccgttcagatagaataccggagtgccggcaggtgccaggcggataaactctttcatggcatgcaatgagaaagtgatatattccatgcggctctctaatcccatttttttcaccgtagccagaatttcctgaacggctttggtctcgcgctttttgctgttaagtgctttcagttcaagtatcagtttagtattatgttcttttccgacttttaagtactgctccagacttgggaggttttctccatttgataatttcaacccagtgagcgcgtctcctttagaatactccataggtctcattttgtacacaggatcatgattgactactaacttgctgtctttagtaagccaaacatcaaattctgaaccataacaaccgatagagtctgcttttagaagtgatgtaatactgttttgtgatgatcccggggttttccagaaaccgcggtgagcaattgcttttgtctgcgcctgcatacaacatgcagccattaaaagggcggaacctatcatcattttttttaaattcattcgttttatcttttaaagggtttatataggtttaattgggtttggcttcaaaattataaaaaagaaaacgcaaattagtcaattatatgctaatctgcgttaatccttgggatttagaatcgaaatactacaaaaaagtaacagaaataaccgattctgtgattctttctgtcgtcagttaagtataggcttcttcatgtattccttttactgcgcgtccgctcggttcattcaggttcttgaaggcgatatcccatgccagcgcttctgctgtagagcaggctacgctgggaacactgggtacactgcgtgctgcactttcgctggggaaatgttcttcaaagatactgcggtaataatattcttctttattttgcggggtattgatagggaagcgcctggccgcgttttccatttgttcatcacttacggcagcagtggttatttcttttaacgtatcaatccaggaataccctacaccgtcactgaactgctctttctgtctccatgccacgctttccggtagcatatcggcaaaggcttcgcgtacgattctcttttcaatgttttttccgggacacattttggctttcggattcaacgtcattgcgacatcaagaaactctttgtctaagaatggtacacgtccctctacgccccaagctgacaaacttttattagcacgaagacagtcatacatgtgtaatttagaaagtttacgtactgtttcttcatgaaatgcttgtggggtgggagccttatggaaataaaggtatcctccgaaaacttcgtcggcaccttctccgctcagcaccattttgattcccatggatttaatgacacgtgccaatagatacataggagtggaagcccgtacggtagttacatcatacgtttcgataaaatagataacatcacggatcgcatctagtccttcctgcacggtgtagtttatttcgtggtgtacggtaccgatatattcggcaacctcacgtgcttttatcaaatcgggtgcacctttcagaccgatagcaaaggagtgaagttgaggccaccatgcatcgcttgctccgtctgtttctatacgtttggccgcatatttcttggcaatggcggagataacagaactatccaagccaccggaaagaagtactccgtaaggcacatcactcattaattggcgatgaacggcatcttctaatgcttctttcacatcgccggctttcgcatcgttgtcttttacagtttcatattccgtccagtcgcgtgcgtaccaacgtttcatttgcccttccttgctgtaatagtaatgtcccggaaggaataattcatactcatcgcaaaatccttcaagagctttcagctcgctgccgaaatatattttcccgtctttgtccctgcctatatataaaggtatgacgccaattgggtcacgggcaatcagaaattcatctttttcttcatcgtagagaacgaatgcaaagattccgctgatatcttccaaaaagtgaatgcctttgtctttgtaaagggcaagaataacttcacaatcacttcccgtctgaaaatcatattttccggcatatcgggtacggatttcccggtggttatagatttcaccgtttacggcaagtacttgtttccggtcgggagagtacaaaggctgccctccactttgcgggtcgacaattgaaaggcgttcgtgtgccaaaatcgcacttccacctacatagataccactccagtccggtccgcggtgacggattttctgagccattttcaatgctttatctcttagctccttggtttgagcttttatattgagtatacctgctattccacacataactttaatttttagttgttaaataagtatctatttccgcagccgtctttcgtcctcctgccatggcgcgtaccaccagactggctccggtagcagcatctccggcaagaaatacattatcggcaaaattcgattgttccggttttaagaatcccatggccagcaataccatatctgcctcgatcacctcttttttcccggtaggtttcagtgtcggacgtcctccgtctgttgccggaatccattctacttcttccacttccacacctgttacgttcccattttttcctaggaattgattggaagtgaggcaccagcggcgtatgcaaccttcttcatggctggaagtagtcttgaggactaccggccactgcggccagggggtagacgggttatgtcccacgggtggctggggcatgatctcaatctgcgttacgctggttgctccttggcgcacactagttccgatgcaatccgaccccgtatctccaccaccaatgacaagtacctttttgcccttggcattcactaatttatctttggagaaagtttgtccttccagaatcctattctgttgggccagcatttcaagtgcaaagtaaatacctttcaaatcccgtcccggaatacttaaatcgcgtgctgccggtgttcccgtacagatgcagtaagcgtcgaatccctccggtaaatgattgacgtcaatttctactcccatttcaaacttgattccttccgcagttaagatattcatgcgccggtcaatcacattcttatccagtttaaaattgggaataccgaaacgtagcaatccgccgggagcttcgttcttatcaaataaggttactgaatatccttttagattgagttgattggccacgaccagtccggcaggaccggcaccaataaccgctactttctttccgtttctttccggggtctgtatttgtatatatccttcacgaaaagctgcttcaacgatagccgcttcgttttcgcgaatcgtcacaggttggtcacatgaaagttttagtacacaagacttctcacaaagggctggacaaatacgccccgtaaattcaggaaagtcacaggtggacgataggatttcgtatgcctctctccatttccctttgaataaagcgtcctgccattccggttgtttattccctatcgggcatgcccagtggcagaagggtacgccacagtccatacagcgagaagcctgtaacttgcggctgtttgtattcaatgtttgttctacctggctgtaatcagtgattcgttcgttcacagggcggtatcccgcttcctgtcgaggtatatttaaaaaagctctaggatctcccattttctttaagttttaagtttaattttagtcccgcatggaaacctggctccggcatctgccggttgtcggttaatagtctctttgcatatctgcaatcttttgttgtaactttctcatttgctcttcctgtagcacttttttgtactcgataggcactacctggataaattgatcgacataatgattccagtcatcaagcatggtacgtgccagtttcgaacctgtatataagtaatgttgacgaatcagttcgtgtaattcttttcggtaactggcttcttcaatcagtgaaagttctaccatttccatattgcagaaatagtcaaagtttccttccttattccatacatacgctaccccaccactcataccggcagcgaagttgcgtcctgtctgtccgagaaccaccacacgtcctccagtcatatattcgcaacaatgatcgcctacaccttctactacggctactgcaccggaattacgtacagcaaaacgttcacctacacgtccgttgatatacacttcaccacttgtagctccataaagtaacgtattgcctgcaatcgtattcttttcagcttcgaagttgctacggataggagggagtacggcaatacgaccaccgcttaacccttttcccagataatcgttagcctcgccttccagtttgaaattaactcccggtactaagaatgcaccgaatgactgacctgccgagcctttgaatttcacgttcaacgtatgttccggtaatcctctttctccatacttcttggcgatgacgccggaaagcatagcgccgatagcacggtcggtattagctatcgtatattccagagaaatctctttctcatgttcaatagccgcctgagctgcatcaataatcgtcacatcctttacagtagaaatagcatggtcctggtcaatgacgtggcggataactgcactattgtcaatgcgtgtcagtaatcttgtgaaatcaattaatgcgtgcttcggattcgggtcgtccgtccccgatttacgttcaatcaaatcagtccgtccgatgatgtcgtccatttttgtgaatcccatttcagccagatattcccggacttcctgtgccaggaaagtgaagaaatttactaggtattcgctacggccatggaagcgtttgcgcagttcctcattctgggtggcaactccaaccggacaagtattttgatgacatttccgcatcatcacgcaacctagtacgatgagggcggaagtggcaaaaccgtattcttcggctcccattaatgccattaggataatatctcgtccggtttttaactggccgtcggcttgcagtactacctgtccgcgaagtccgttcaagactaatgtctgctgtgtttcgcttaatcccagttcgggagagatacctgcataacggatagaagaagcgggcgaagcccctgtaccgccttccgctccggagatcacaatcaagtccgctttcgcttttgccacaccggcagcaattgttccaacgccactttccgctaccagtttcacgctgatttttgcttgtggatttatgttcttcaaatcaaaaatcagttgagccaaatcttcgatagaataaatgtcgtggtggggaggaggagaaatcagcgaaattcccggaatagagtgacgtgttttggcaatcacatcgttcactttgaatccgggaagttgtccgccctcgcccggtttggctccttgggcaattttaatctgtatttcatctgcatttaccaaatattctgtcgtcacgccaaaccggccggaagctacttgtttaatagcacttcgcatggaatttccatcaggtaacggctggaaacgggcagcatcttcacccccttcacccgtattgctgcgtccgtggatcctattcatggcaatagctattgcttcatgtgcttccttgctgatagagccgaaagacatggcacccgtaacgaagcggcgtaagatgctttccaccggttctacctgttcgatagaaatcggattacgacggaactttaagaaatcgcgcaggaaaataggtttttccttttcatctaccaagtgagtgtattccttaaatttcttgtaactacccaaacgggtggccaactgtaatgtactgattgtttcaggattccaggcatgtttttctccgtctttacggaaagaatacaaacctttattcggtaataatccgcctgcctctgctgcaaatccttcattatggaaagcaatggcgtctctagctacctcctccaatcggatacctccaatcggtgaacctagtcctccgaaatatgctttgctcagttcttcactcaaaccgatagcttcaaagatttttgctccccggtaagaacggatcgtagagatacccattttactcataatcttgaaaagtcccttgcagattgacttgatgtagtttttctctgccgtggcataatctagttggatatctttgttttttaccaacttatcaagaatagcaaaagccatgtatggatttagggcgcttgctccgaatcccagcaataatgcagcgtgcatcacttcacgtatttcaccgctttccacaaccagcgctgtctgtacgcgtttccctacagaaattaaatgatgatgaacggcactcactgccagaagtgaaggaatcactgcatgagtggcatctacattccggtctgtcaggacgatatagtttactccttctgttacggaggcctccgcctgtttgcaaagttcggtcagtgcttcctgtaatccggctttccctttggctacttcaaacaacatcggcagtttgacagtcttaaaacctttatagcggatattgcaaaggatatccagctgtgtattgcttaggatcgggtgattcagacgtaccattttacaatggctttcactaggtgtcagaatattcataccgactgctccgatatattccgtcaatgacatcaccaattcctcgcgtagcgggtcaattggcggatttgtcacttgggcaaattgctggcggaaataattgtaaagcaactgcggcttgtccgagagtacagccagcggagtgtcgttacccattgaatgaatcggttcggctccggtacttgccatgggtataatcagtttctcgatatcctcctttgagtaaccgaaagtacggagcatccggtcgtaattctctacatgatgaggcattttgcgtccgcttttcaattcatccagttcgatacggtttgtagacaaccagatacggtacggttttgcttccgccagttgtttcttcagctcaccgtcataaaatatttcgcctttttccgtatcaaccagtagaattttacccggttgcagccgtcctttctctttgatatctcccggttcgaaatccattacaccgacttctgaggcaaccaccatcatatcattttgggtaatcaggtaacgggcggggcgcagaccgttacggtcgagcataccaccggcaaagcgtccgtcgctgaataacaaggcagccggtccgtcccaaggttccattagtatggaatgatattcataaaaggacttcaaatcttcactgatagggttcttctcattgaaagactccggcacaagcattgccattgcgtgaggcaggctcaatcctgacattaccaaaaactccagcacgttgtccaatgaggcgctatcactcatgcccggctgtataatcggacggatctctttgatatccccgagagtgggagaggagagtacactttcgcgagcttccatccacccgcggttgccgcgaatcgtattgatttcaccattgtgtgccaaaaggcggaaaggttgtgccaatccccatgtcgggaaagtgttagtactgaaacgggaatgcaccaaagccaacccgctggtgaagtaattgttcgtcaggtcgggataatagttccgtagctgcaatgacgaaagcatacctttatatataatactttttgtagagagcgaaacgatgtaaaaatcctctttcgccggaatggctgacattctgactttattttctattcttttacggatcagatacagtttgcggtcggcagtttctgtctcagtaaatcccgtgataaatacctgtttgatatccggttcattagccaaagccgcttctcccagaatttccgggcaagtaggtacattacgcagatgcatcagcgtaagtccttctttttcgatttcctcaataatgatgctcaaaatagttgcctggtctttctcttttttcggtaaaaaaagcagaccggtgccataacgtcccttttccggaacgggaataccctgcaataaaataaactcatgcggaatttgtaacataatgcctgcaccgtccccggttttgttgtctgcaccttcggcaccgcggtggcgcatattctctaatacttttaaagccgactcaacaatgtcgtgtgacttttctccgtgaatgtttaccagcataccaacaccgcaggcatcatgttcgtatgccgcatcgtacaggcccggctgtttgggatgtcgttggtaagggaatccttttgctctgttgttaaaaagttcttgtttcttcattcttgctatctttattgtatgataatacctgtttggtgtatcaaaatgtttggcaaaattaaaaaattaatttcataatgatactaaattctatcatttctatgacacgaaatgagaagcctattctatattcttttaatttgtaatcaaaatcgttggaattgcttttaaattgttagtctgttgtctattattttaagatgattgtaatttgtttctttttgagctaaaaataatatattatttaactttttgatgtatttacaacttttttgtgcgtttctgttaaataaatatcgaatttataatctttatgttatttgaaatatgtatatttgcaaccaaaataaaaacgctataatgtgtgtggaatggtaggctatattggtacaagaaaagcctttcccagcctaataaaagggctgaagtatcatcgaaaactatgttgttttcaaaggaaaacttcaagcccaaggaaatacagtcatcaacaaaatcgccgattgtagtatcgaatttcccgaaacaatcgaatgcctcgatctgttgattactacggtacctcttcagttgcctgcttaccatattgcggtttgcaagggaatggatgtaggccagcccaggaatttggctaaatcagtaacagtggagtaaaacttgtaacttataacaggtaatttggatttgtataaatggaacaattgaaacatgaatgtggcgttgccatgatacgcctgcttaaaccgctggagtattacgagaagaagtacggaacgtggatgtacggtctgaacaagctttatctgctaatggaaaagcagcataatcgtgggcaggaaggtgcgggactggcttgtgttaaactggaggccaatccgggtgaagaatatatgtttcgcgaacgtgccttaggttccggtgccattacggaaatctttgagaatgtacagaataatttcaaggatttgacttccgaacaattgcatgatgctgagtttgctaaacgtacattaccttttgcgggtgaaacgtatatggggcatttgcgttattcgacaaccgggaaatccggtatctcttatgtgcacccgtttttgaggagaaacaactggcgtgccaagaacttggctctctgcggtaacttcaacatgacgaatgtagatgaaatttttgcccgtatcacagccattggacaacatccccgtaagtatgctgatacctatatcatgttggaacaagtggggcaccggcttgatcgtgaagtggaacgtgtgttcaaccttgccgaggccgaagggcttacaggcatgggaatcaccaactatatagaagagcatattgatttggctaacgtattgcgtacctccagccgtgaatgggacgggggatatgtcatttgcggactgaccggaagcggtgaatcttttgcaatacgtgatccgtgggggatacgtcctgctttctggtatcaggatgaagagattgctgtgttggcttccgaacgtccggtcattcagacagcttttaatgtccctgtagaagatattaaagaactgcaaccgggacaggcattattgattagtaaagaaggtaaactgcggacatcacaaataaacaaacctcgtgagaaacaggcttgttcattcgagcgtatctatttctcccgtggtagtgatgtcgatatttacaaggaacggaaacggctcggcgagaaactcgtgccgaacattttgaaagctatcaacaacgatcttgaccataccgttttctcttttattcccaacaccgccgaagttgctttctacggaatgttacagggactggatgactatctgaatgaagaaaaagtgcagcaaatagctgcattaggtcataatccgaatatggaggaactggaagttattctttcccgccgtatccgcagtgaaaaggtggctattaaggacatcaagctccgtacgtttattgccgaaggaaacagccgaaatgatctggcggctcatgtttacgatatcacttacggaagccttgtttccggtgtcgataatctggtgattattgacgatagtattgtgcgtggcacaacattgaagcaaagtattatcggtattctcgaccgtcttggtccgaagaagattgttatcgtttcttcttccccacaggtccgttatcccgattattacggtatcgatatggcaaagatgagtgagtttattgctttcagagctgctgtcgaattgctgaaagagcgggatatgaaagatataattgcgtctgcctaccggaaatccaaagatcagataggtttgccgaaagagcaaatggtgaactatgtaaaagaaatatatgcacctttcacggatgaggaaatctccgccaaaatggtagaactattgactccgaagggaacgaaagctaaagtggaaatcgtctaccagccattggaagggcttcatgaagcctgtcccaattatcggggcgactggtactttagcggcaattaccctacgccgggtggcgtgaaaatggtgaatcaggcattcatcaattacatagagcaactgtatcaattctgacaatcatacaacgattcaaaaataagaatgagaaatgtgacattaatccttgacgacgggagccggttttccggcaagtcgtttggctacgagaagccggtggcgggcgaagtagtttttaatactgccatgaccggatatccggagagtctcactgacccttcgtatgccggacagttgatgactcttacctatccgttgataggaaattacggagttccccctttttcaatcgaaccgaacggactcgctacttttatggaaagtgagaagattcatgcggaagcgattatcgtaagtgactattcttacgaatacagtcattggaatgctgttgaaagtctcggcgactggctgaaacgtgagcaggttcccggcatcacaggcattgatacccgcgaactgactaaagtactccgcgaacatggcgtgatgttgggaaagattgtttttgacgatgaaccggacaatgttcttgaagctacttatgcaggcgttaactatgtagataaagtaagttgcaaggaagtgattcgctataatgaaggtgcggataaaaggaaagtggtattggtggattgcggtgtaaagactaatatcatccgttgtctgctgaaacgtgatgttgaagtgattcgtgtcccttgggattatgacttcaatggactcgaatttgacggattgtttatttccaatggtccgggcgatccggatacctgtgatgctgcggtgcaaaatatccgcaaggcaatgaaaaacgaaaaacttcctatcttcggaatctgcatgggtaatcaattactctcgaaagctggaggtgccaaaatatataaactgaagtacggacaccgtagccacaatcagcctgtgcgtatggtaggtacggaacgatgtttcatcacttcccaaaatcacggttatgccgtagataataatacgttaggagcagattgggagccgcttttcatcaatatgaatgacggttctaacgaaggaattaaacataagacgaatccttggttctcggcacaattccacccggaagctgccagtggacctacggacacggaatttctgttcgatgaatttgtaaacctgcttaaataaccgacaattatgaaagaaaatataaagaaagtattgctgctgggttccggtgccctaaaaatcggtgaggccggtgagttcgactattccggttcgcaggcactcaaagccttgaaagaagaggggattgaaacgattctcatcaacccgaatattgctacggtacagacttccgaaggagtggcagatcagatttacttcctgccggtgactccgtacttcgtagagaaagtgattcagaaagagagacccgaaggcattatgcttgcatttggcggtcagaccgctttgaattgcggtgtggctttatataaggaaggagtccttgaaaaatataatgtaaaggtactcggtactccggtacaagctattatggataccgaagaccgtgaacttttcgtgcagaaactgaatgaaatcaatgtaaagactatcaagagcgaagccgtggaaaatgcggaagatgctcgtcgtgcagcaaaagaactgggttatccggtgattgttcgtgctgcttatgcattgggtggtttgggttccggtttttgtgataacgaggaacaactgaatattctggtagaaaaggctttttccttctccccacaagtattggtggaaaaatcactccgtggctggaaagaagtggaatacgaagtagtgcgcgaccgcttcgataactgtattactgtttgtaatatggagaatttcgatccgctaggtatccataccggtgagtctatcgttattgctccgtctcaaacgcttactaacaaagaatatcataaacttcgtgaattggctatccgtatcattcgccatatcggtatcgtgggcgaatgtaacgtacaatacgctttcgatccggaatccgaagattaccgagtgattgaagtaaatgcccgtctttcccgttcatcagccttggcctccaaagcaaccggctatccgctggctttcgttgccgctaaattaggattgggttacggacttttcgatttgaaaaattccgtaacaaaaacgacctccgccttcttcgagcctgctctggattatgtggtctgtaaaattcctcgttgggacttgggtaaattccatggggtagacaaagaattgggttcttcaatgaaatcagtcggtgaagtaatggctatcggtcgtacttttgaagaagcgatccagaaaggtcttcgtatgataggacagggaatgcacggatttgtggaaaacaaagaactggttatctctgatattgacaaagcacttcgtgagccgaccgataaacgtatttttgtaatatcgaaagcattccgtgccggatacacaattgatcaggtacatgaactgacaaagattgacaagtggttccttcagaaactgatgaatattatgcagacttccgaagaactgcacagttggggaaacaatcacaaacagattaccgacttgccgggagaattgctgaagaaagcgaaagtgcaaggcttctccgatttccagattgcccgtgccattggttatgaaggtgatatggaagacggcattctctatgtccgtaatcatcgcaaacgtgcgggtattcttcccgttgtgaaacaaattgatactctggctgccgaatacccggcacaaactaattatctatatcttacttatagtggtgtagcaaatgacgttcattatctgggtgaccataaatctatcgtcgtactaggctccggtgcctatcgtatcggttcttcggttgagttcgactggtgtggtgttcaggcattgaatacaatccgcaaggaagggtggcgcagcgttatgattaactataatccggaaaccgtatctacggattacgatatgtgcgaccgcctctatttcgatgaactgactttcgaacgcgtaatggatattctggaactcgaaaatccacatggcgtcattgtatctaccggtggacaaattccgaataatctggcattgcgcctggatgcacaaaatatcaatattctcggtacaagtgccaaaagcattgacaacgctgaggatcgcgagaaattctctgccatgctcgaccgtattggtgtagaccagccgcgttggcgtgaactgacttctatggatgatatcaatgaatttgttgacgaggtcggttttcctgtacttgtccgtccgtcttatgtgctttcgggtgccgcgatgaatgtttgctccaatcaggaagaactggaacgtttcctgaaactggcagccaatgtatcgaagaaacatccggtagtagtaagtcagtttattgagcatgccaaggaagtggaaatggatgccgtggctcaaaatggagaaatcgtagcgtatgctatcagtgagcacatcgagtttgccggtgtgcactccggtgatgcgaccattcaattcccgccgcaaaagttatatgtggagacggttcgccgcatcaagcgtatcagccgtgagattgccaaggctttgaacatttccggtccgttcaatatccaatatttggcaaaagataatgatatcaaggtgatcgaatgcaacctgcgtgccagccgctctttcccgtttgtcagcaaggtattgaagataaactttatcgaactggcaacgaaagtaatgcttggcctgcctgtcgaaaaaccggaaaagaatctttttgaactggactatgttggaatcaaggcttcccagttctccttcaaccgtttgcagaaagccgacccggtgttgggggtagatatggcttccaccggtgaagtcggttgtataggtatggatacttcctgcgctgtactgaaagcaatgctttccgtaggttatcgcattccgaagaagaatatcctgctttctacaggtacaatgaaacagaaagccgatatgatagacgcagcccgtatgttggtaaataaaggatataagctctttgctacgggcggtacgcacaaagcgcttgccgaaaacggtattgagagtactcatgtttattggccgagtgaagaaggacatccgcaagctttggaaatgctccatagtaaaaagattgatatggtagtcaacattccgaagaatttgacagccggagagttggacaacggatataaaatccgtcgtgcggctatcgacctgaatgttccgttgataacgaatgcccgtttggctagtgcatttattaatgctttctgtacaatgagcattgatgatattgctatcaagagttgggcggaatataagtaatataataagttgttatataataagtagaagaagtcgtctctgttttttcaggggcggctttttttataaaaatattgcaaaaaggataattggcttagtctccgtgctcatttttttatgctcgaaaattagttgcattcaaatattcgttttacctttgacagaaattgtcaacgtgtaaagtaaatggagtcattgagtcagtattcaaaagatgttcgtgaggaattgaaattgtcattacaagaagtctataatcgaactgatatagatgtcactctttgggggtataagatgtttgatttggagagtcgtagatatattggaaataaagcaaagttaaccccttggattatgaatataatcaacgagcatacaggagggtttgaatcattttttgatgtctttgcgggaaccgcatctgtttccaaggctgcgataccttatgcaaagagaataataatgaatgactttctgtcatctaacaatattatatatcaagccttttttggttccggagtttatgatatgaataaacttcattcaatcatagagtattataataatataaatcctgacactattgaagacaattacttttcggataatttcggagataagttctttgattacaagaactccaaattgataggtcatataagggaggatgtcgaaaggaggaaagtggcattgacgcataaggaatatgccattctattgacctctttaatatatagtattgataaaatagcaaatacagtagggcattttgatgcatacatcaaaaaaaacatcctgtatcatcctttatccatacaacttattagaccacttgatcctcagtgtgtagaaatctttagagaagactccaatatacttgctgaaaacatcacggcagatgttgcatatattgacccgccttataactctcgtcaatatagtagattttatcatatttacgaaaatctggtaacttgggagaagcctgaattgtttggtgtagcgatgaagcctaaagcacaaaatatgagtgcatattgtacctctagtgctcccgttgcatttcgggatcttataagtaaattgaacgtcaagtatattgtcgtatcatacaataatacatacgaatcaaaaagcgggtcatcaaaaaacaagattacattagagcagattaaatccattttagaagaacgcggtactacaaagatatatgattgcgatcacagatattttaatgcaggtaagactaattttgcaaagcacaaggaactattatttatcacggaagtagggcaatgaaaaaaaagatagtaagatcaccttttttctatgttggagacaaatataagctcattgaagaaattagctcgtatttccctgacgacatagagaaattcgttgaaccgtttgttggcggagggtcggtatttatgaatattgacgctcggaaattttacctgaatgatatagatgtaaatgtaattgcgctacacaaattcttatgtaaatctgccaataaacgaactgaattttttagtcgaatagaaagtcttatcgctgagtatggactatcatattcatataaggaagatcgtattccggtagaacttaaacgacagtataaaaaaacatattatgctaaatataacaaagaagcgtatgggcagatgaaaagggattttaatgaatcgtcggtagcagatttatatgttttgtatcttctgttgatatatggatttaatcgaatgctacgattcaataaaaatggagacttcaatcttcctgtaggcaatgttgattttaatgctaatgtagtaaatgctctagaggcatatttcatgcaagtaatatccaaaaaacctaaatggtttaatatcgattataaagatttcctacaaaaaataaggttgtctgaaaaagattttgtatatttagacccgccatatcttatcacatttagtgaatataataagttatggaatgagcaagatgaaattgagttgttgcaattattggatagcctaaacaaacgacgtattcggttcgctatatcgaatgttactcattacaaaggtcgatgtaacaatctgtttatagattgggcatgcaagtacaatgttcatccgataaagagtaattatataagctatcacgacaattcaacaaaacaaattagcgaagtattaatcacaaattactaatatgcctagaaaacctgaatataagccgttgctttacacgactacgatacgaaatcctgagcgttttaaagatttcatgcacatacttaaacggttcaatggccggatacttaataataaaacagtcgagttgttcgagagagaactgtttaaggttggcttgtatcgaccaatgaagcgcccggaaacagttcaggataagtggaaatcaacaaagaacggggaattagccagcaaaccattaacagatgaagaaacgaaagatgtgtatcagcagaatgatccccaagtcaacaaaagtataaagggacatcaagaagcagggtttcctaaagggtggccgagtcgatttgacacacaattcaaattgatgaaagttctgggctttgtatattatgaatggggaaagcctataaacttctctcaaacaggtaactatcttgcagatactgtatccattgaaatagattcaggagcaatatctcgcgagattgtaaatccacagaatgagcaaattgcatttatgcaggcttttgccaagcaacaaagatgcaatccgtttatttgtgaattaaatgataatattccactgatattattgcttgaagttataaagaagttaaactctgatccagattataatggttcgggaatctcatataaggagatacctttagttatcttttggaaagataatgatgcggaatctttgtatcagcgtattaaacttctgcgaaaggaacataggtacaatccttcaaatgaagtgatagaggatatatgtgtaaacgaaatacttgggggattcaagaaatttgatcttgactctattgtgtccgaatatcccgatgaatttgtccgcaaaatgagaatgacaggacttatatcatttagagggggtggtcgatttatcgacattaaccataatgaagatgataagataaattatatactggctaattatgccacatatcgcaagtacacttcaaaagaagaatattttgactatatgtcagacattgatgatgcattgtttgcattaaaagctgtcgaaatccccaaaaatgtcgcagctgataaattagctaaactcgtgggtgattactcatgggattctattaaaaaagaacttacccatttggcgaaaaaaacatcatcaagccacaatattttaaggtttattgcagctccggcaagattagagttcctgaccgcccttgctattaagtcaaaactgcctgctgttgaggtaattcccaattatccatgtgacgatgaaggtctgccaacctctacggctggtggggatattggagatattgagtgtttcgaggcttctaacagtatattggtggaagtcacaatgtctgaagggcgtcagcagacaatgatggaagtatggcctattgcgagacatttaaaggagcttagagaaaaatatgaatgtgaaaatttccaatgtgtgtttctggcaccaagtatatttgttgattctgagaatcagatagactgggttaaggataaaaagcagcttgttattcgtccatacaagattgtagattttattaactatctggatacagcagcatctttatatcagattgtataaggttactaaaaacaatataagaaaactatagaaaagcaccttcttgtttggaaatttgtttaaattctcgtattatcgaattcatttttaaactaatagtaataatatgagaaaagacggatttaccgtatgcgcaaaacattatattaagtgtttgcggcaagaagggcgttatgccactgcgcatgtttatgaaagtgcgcttcgctctttcactatgttttgtggcactgcgggtgtatcattcagacagatcacccgtggaaatttaaagaggtatagcagctatcttatggattgccatttgaggcttaataccatttctacctatatgcggatgttgcgctgcatatacaataggggagtagatatgcatcagaccccatacgttcatcgtatgtttcgtgatgtgttcaccgggatagacactcgtcagaagaaagctattcctataaacgagcttcatacgttactcaacgaagacccgcaatctgataagctgcgtcggacacaagccattgccaacttattgtttttattttgcggaatgccttttgttgatcttgcctatttggaaaagtcaaatttggaagggaatatgttgaagtacaaccgtgccaaaaccggtattcctatgaacgtagaaatattggattcggcagcaactatcatttcacaacttcgcaataagcatacaacagttcttcccgaacatccggattatctgttttacatattgagtggaaagaataagaggagtgatgaggcgggttataaagaataccaatctgctttacgttgtttcaataatgatttgaagagtttagccagaaagttatgtattcgctcctctgtaacctcttatacattccgtcattcatgggctactacggcaaaatatcgtggagttcctatcgaaatgataagtgaatcattgggacacaaatctatcaaaacaacacaaatctatttaaaaggcttcgaactgtcagaaagaactaaagtaaatcggttgaattattcttacgtgatgaacttcaagactatctagttgtatgtgtgtaaactgttgataaatagtatgcttagatgaatgttactttaaaggtaacggaaatatttcgatgcaaatataggtaaaaatattaatagcatacaagtaaactttcctttttttcctttttctcttgaaatatgcgataaaaaagctgctgaacatgaaaatatgaatttcatgctcaatggattttattgcctgaatccgaatgatttctgcattgaatatcagacattccccggttttacgtcctccttgttagtataatttcctttttcattgctgtcatgtctcctatgtgtatgatccgttacctttaaagtaacggataaaattggggtaaaaaaatatgatttttcaagaaaagaagtcagtcaatgccgggcctagttgtgggacaggggaaggcgtagcgcactcaaaacgttggtatgtcgctctcgttcgtatgcatcacgagaagaaggtatccgaacgtttatccaaaatgggaattgattcttttgttcccgttcagcaacagattcatcaatggagcgaccgtcgtaagctggtggataccgtcttgcttccgatgatggttttcgttcatgtgactcccaaggagcgtatggaagttctttccttttccactgtcagccgttatatggtgatgcgtggtgaaagtactcctgccgtaattcccgacgagcaaatggcccgtttccgtttcatgctcgattattctgatgaagccgtctgtatgaatgactctcctttggcccgtggtgagaaggtccgtgtcataaaaggtcctttgagcggccttgtcggcgaactggtgactgtcgggagtaagagtaagattgccgtccgtttgaatatgctcggttgtgcctgtgttgatatgccgatcggttatgtagagcctattcacttaatcaatgatactccgaaagtttagtgttcaacatacgctcttgaggtgtttctattaaaataactttaacgggtgcaggaactatgctgtatgattcctgacaaaattgctttggctacggggcaatgttaaatctagaacaaatttttaattcaactcagtttagggtacttccaactgccctttcaaaggggggacctaaattgagtgcttacaacggctatactgacaccatggaaaagatgttgcgctggctggagtacgacctttattattggggccaccgttcgtggctgttcgatttcaagattctgctcaacacgttccgttccaacgtatttggcaagaagttctgaagcatttaaatatgaattaaaaaatggagaaccaaattaaggccggagccgctcttaactacgtcataataggaataaatgctttagtaggattactatacaccccatatatgttacgtatgttgggccaaaatgagtatggtttattctcactggttgcatcagtaatttcctatctgaccattttggatttcggatttggcaatgctatcgtaagatacaccgcaaagtttcggacggaaaacaaaacgactgaacaatatgaaatgtttggaatgtttttgaagttgttttgtgccataggtctatttgctttgtgtattggaataatcctttgcttcaatgtggataatctattcgacaaatccatgtcgccggaagaactgtcgaaagcaaaaattctactgttaatattattaataaatcttgccttgacctttccgcttagtgtttacggatcaataataaatgcgtatgaaaattttattttccaaaaattagcccaaatagcccgtatcgttctatctaccattgtaatgattgtgattttaagattggggtataaagctattggattagtagttgtacaaaccatattcaatattgcatttctgttcggcaatgctttttattgccggcataaactcaaaataaagattgtctttggaaaaatgaattggaactttttcagagaaatcctattttactctttttggatttttcttgcggctataaccgaacagttttattggaactcgggacaatgggcattaggaatctttcaagggacaacaatggtagcgattttttcgttagccattcaattaaagggaatgttttatctgttttcttcggccataagttcagtattccttccaaaggttacacggatggttacttccaataccactgccaaagaaatatcggatttattcataaaaacaggacgaatccaatatgcggtaatatcgtacattatagtgggttttgtgatattcggaaaatcatttataaccctttgggtgggtgaagagtatatgtctgtctactacattactttgatgatttttgtatgtaccacaatcccctcaatacagaatctggggaattccatattgatggcatacaataagatgaaaaggaaaacgattattgtgatattcgcttcattattgagcttcgtcgccatattcccttgtgcgaaatattggggtgccgtggggtgttctttccccattttcttatgcatcgtaatcacatacggaccgatattgaacaagatgtatgcccgggtaatcggaataaatgtacggcagttttggatagaaatattaaagatgtctttggtgccctcattgtttgttgtagcaggtctgttgatattgccatatactgatttttccgattggggcaaattgggcttgggtattatcgctttctctgtgttttatctgcctgtatcatacagactgtctcttaacaattatgagcggaactattttaattcatttatgcgaaagataaaatttgtgcgatgaaaatcttgatattaggaggaacaggtgcgataggtactccacttattgccattttgagacaaaatcaggacatccaaatttgtgttacgtctcgttcagagcattcatcagaagaaaatgtacaatatttgaaagccgatgtactgaaccaaagtgaactggaaaacatccttatgcggaatcattgggacgctgtcattgattttatgatatatagcgaatcggtattccggcaaaggattggtttgctgctaaagtctactgaccaatatttctttttgtcatcggctacagaatactctgatttggatgagataatcacagaaaagaccccacgtttgctcgacgtaactaccgataaagagcttttggcagtaaagccatatccgataaacaaggcgttatgtgaaaatatattgcgacagaccggattgacaaactggacaattgtaaggccctatataacttttaactctaatcgtttgcaactgggatgttatgagaaagagttgtggttatggcgctgtcttaacggtggagaggtcttgttcagtaaagatatagcacaacaatacaccacacttacttttgcgaaagatgtagcttttgccataagtaaactgatcgggaatgacaaagcgttcggcgaggactttaccataacaacgaatcaatcgttgaagtggaatgagattctcgatatatataagatggttcttcttcgtgagcgaaacataaaaatgcgtgtaaaatggacggatgaaagtttgaatctcaggttcagacaagggcaatggcacgcaaagtacgatcggctttacaacagaagattcaataatgccaagttgatgggcattttgccggatttgaaatttacggaagtgaaaaaggggttggagcattgtcttaccgaattccttaaaacggaaaacttcaggtcaatcccggctccttgtcatgcccggcttgcaaattcgtatgtaccattgcaaaatataaggggtattaaaaacagagtaaaacaattgcttgtgagatatatgccaaaaaccgttgtttaatcgcatatttttggttatcggaaaataaatctatggaaactaaatattatagcgctgaacgcaatgtgcaaatccttgtttctcttttgaaacaacatggaataaagaaaatcatcgcttctccgggaacaaccaacatgccattcgtggccagtgtccaatatgacaaatggttcgatgttatctcttgtgttgacgaacgttctgccgcatacatggcatgcggcttagccgcagaaagcggtgagccggttgttatcacttgtacgggtgcgacagcttcacgagactatttcccggcgataactgaagcgcattaccgcaaattgcctgtacttgccataaccggcgcccgtgaggtggatacatacggacacttaaatcctcaaacgatcaatcgtttgagccatccgcaagatacatacgtttgcagtgttcatcttcaactttgtaaagatgctgatgatgaatggggcaatacgataaaagccaacaaagccattcttgcgttgcgccgtaatggtggcggaccggcacatattaattgtgtgacgcttgtgtccggtgattatactgtgaaagaaattattccggctaataccatattccggtttggctacactgacgttcttcctccattaggcgatttcgcgcgtatagccatattcgtgggtaaccattcacggttcacttcaggcctgacagaagctgtcgatgccttttgcgagaaatacgttgctgtggttttttgcgataatacgagtggctataatgggcggtttaaagtgttgctccccttattaagttctcaatcgcaaaaagattgtgagattaatcatgtaggtctcctcatacacatcggagaagtgtccggagcatatatgaaggcttttccacaagaagtgtggcgggtaaatcctgacggtgaacttcgcgaccattttagaaagttgaaatatgtatttcaaaccgaagaagaatggtttttccgtcattatgtttctatggatgtcccggcaaaagcaaaaaacactttccttgaagaatgccggacggaaatagagactacacgcgccaaaatcaatgtcgacgccatacctttttcgaatatctggatggcaagccaactatcgggaaagctgccggacgaatcaattctccatgtcggtatcttgaactctctgcgttcatggaattactttaatattcccggcagcgttcatttccaatgtaataccggcggatttggtattgacggacctatatcggcacttgttggagcttcatttaatgccccccaaaaaatatcttttttagtggtgggcgatttagctttcttttatgatctcaacgcccttggcaaccactatattaaaaataacataagaattcttcttgtaaataacggagaaggaatagagtttaaaaattaccttcatccggctttcaagttcggtgatgccgccaatgaatattttgcggctcgtggtcatttcggcgcgcaatcgccgagattggtccgtgattttgccggtgctttaggatttgaatatcgtgcgtcaaccgataaaaacagttttcttgagaacatagattggttcacatcctgcaaactgacggacaaacctttggtttgggaagcttttaccaacgaagtggacgaaaacgcctcgattctgtatatgaacacattgaacgaatcggcgaaaggcattgcaaaaagaatcgccaaagccattctgccggaaagtgtccagcgaaaaataactgaacacatcggtcgcactaaataaaaatttttaagtataaataaaatgaaaataggaataattaccatttttaatgttccgaattatggagctatgcttcaatgttatgcattatctaaatatttaagagatttagggcatgatgtatttttgtacgaagttccgttcaataaaagcaataagttattacataatttaaaacgaaagttgttcttatctcaaatgactcattttatatcagagttcttaccaccgtatacatgtgatttatcagctccggcggatttatatatggtaggaagtgaccaagtttggaattctgaaatattgcaagaagaaacggaaaaatatatgctttcatttgtccctaaaggaaataagaaagtatcatacgcagcaagttttggaacagaaaaatggacggatcataacctgtatgaaaaagccaaagaactgcttagcgattttaattatattactgtcagagagtcatctggtgtggatatattaaaacaaaatttcggattagattctttccaagtattagatccctgtttcttattgagcgattattctgaaataacagaataccgaaaacggaaagatggagttgagattaatgatcaacttgttacttacaaattagtttattcgtatgactggtatcttcaagctgaaagactggcaaagaaattcaattgtaaactaatcgaattaaacggaagatatttgaaaaaacgaagcgatatgcatggctttaatataaaaaatattcctgtctctgcatgggtttcatctattgctacggcaaaatatgtggtaacagactcttttcatggttgtgtgttttcgttgatatatcaaagacaattcgttgttttaccggcattgaaagcacgttctacacgtttgacttctttgctgtccgctttgggattaacagataggattgctcatacggtgcaagagtgccggtctattcttgaaaaagaaatcgactataaaagagtttcgattatattggaaagactacgaaaggaatctcggaatcaacttaatcaaatgctacaggtttaatgatatgaatattttattttatcaatttggcattaatcctttgaaaggcggagtgcaaagagtttcgtataatatagccaaacaactaaaattgcaaggcgataaagtttatgcagtttataaggacgatgacgcttttaccgaaaatctaagaaatgcatttgaggattgtttaaaaataaactctttagacgatagtgcttttattaaattggtaaagttcagcagaacatgtaaagtcaatataattatcaaccaatgcggttttagcatatcagataccaagttcttatcaaaactaaaaaaagaatgtaatatcagattatattcatttatccatatatctccgaccggcagccgcgatgtattacaattcagagatttcagatttcctaagctggtattacgatcattggcaaaggaatttatgttcattttttacaaggctgataaatggaaatacaaacgcgtttataaattgtccgacaaagtcgtactactgtcagaatcttttataaccgattttaaacagatcatttgcaacgaagacataaatcataaaattgcagctataccaaattgtattacctatcctttgcaagatgaaagtgtactgcaaaagaaagaaaatatcttgctggtagtaacgcgtatgggggaaactcaaaaaaaaatttcccgtgtactggattgttggaaaatgctgaatgcagaattagaaaattgggaattgattttggttggggatggttcagacttacagacttacaaagatattgcccgcaagaacaaactgccaagaattacattcacaggtatggcagatccttcttcatattatatgaaagcttcgattttccttatgacatccgccacagaaggatttggcatgacacttttggaggcacaacaatacggtgtagttccaattgcaatggattcatataaatctgttcgagatttaatcgctgacgggaaaaatggttttataatacctgataaaaacatttcggattttgcgtctaaaatattagtgctagtaaagaataatgaactaaggacttctttggcaaagaatgcattgcattcagtccggcgtttttcggagaagcaggttcttgcccaatggaacaaattattaagtgatgaaagaacttatctataacatttttacattcatattatctcccatattatctttattgttgtcatgcaaaaacgtattgacagaaaaggtctatgtatatttcattggcgcattcttttctgtcttcggagcatttttgcctcctgtgtcagatgcttatcggtatcgtgaattgtattacaaaacaacttttttctcttttgactttaatcatttatggataaaagataaagattttttatttaccttcttgtcatcaatctttaatggaatgggggtaacatttgaacttttcaaactttttttgcttttaaccagctatatgttatattgctggatgtttttggatatagtaaaaaacaatccaacgctttttaacagcaaaagattttttagattatctgtactatcacttttctttagtatcaggttgtttacgctgacatcaggaattcgttttggagtagcgtccacaattatcattatcgctatttacttatggtacaaaaaggattacataaaatccattgccgtatttgtactgtctgttaccatgcacttttcaatgttgttgtttcttcctttggttataggtgcgattttgttatctaagtttaaaatacctccaattgtgaaagggcttactattctaattttacttatcacagctcaaacaagtataggcaatctattattatacttatttcctgaaaacaacttgatatccggtagcgtatcaacgtatattgatggtcattggggaacaaatgccatattaaaaacggcaagttttggtggcttgatttttacttttgtccgcatcttgcctgttataccattagcatacattgtactaaaaaagaaagataccaaccctttcttgtcagaagcctgcttcttgcttttgttactattgtcaatatctgtgtcatctttaactttgctgcttagatattcgaatgtagctattgccatcctttttgtagttttgcttactacgttgaaggatgacaaaaaatcattaaaagagattaagactgctttattgtctttcatgattatgtttggatgttatgcctatacacagagagactccttatctcaattcttgttacaatatcgtgtaattctaagtccgataacacttattggagattatacttatactgatgaatgggtacagacccacttggattttaaaggggaatatcgttaatatgaaaatagcatatatattatcttcgttagaaaatgccggtccgattgttgttgcatacgaattggtgcaacaattgattaagcatgatcatacagttgaggtattctattttgatgataaaatagatttagactttccatgtccaatacacaaaatcagtatgtggaaacaatttaagttccacaactatgatttggtacattgccatggtttacgccctgatttgtttgtactattgcataagccaatgttttgtaaaacgccggttgtcactaccatacacagctacatgttcagcgaccatgcttttaagtacgggaaatggcaatctaaaatcacggcaaggcttgtcttggcatctaccatccgcgatgataaaatcatcttgctgagcaaacacatgatggattattattctcattatctgcctgctaagaagttgacgtatgcctacaactctcgcctctgcgacctgagcctgaaacctaaagaagatgatgaaagaaacatattggagtttaaagggaacagcattctgttatgttctgtaagtggtctgaaccccaggaaaggactacaccaaattatacaggcacttccgcttttgcccgatttcaaatattacattgtgggggatgggaaagaacgtcagtttttgcaagaattggctcaaacgttagaagtggcagatagagtgttgtttgtgggtaggaaatctgccggcttccgattcttgcatcttgccgacatcttcgtgatgcccagttatagtgaaggtttcccattagcgatgctggaggcggcttcgatgcaaaaagttattgtctgttcagatatgcctgtattccgggaaatcttctctgataaggaaataacaacctttgaacttgacaatacaaacagtttgcgtgatgcattactcaccgcccatcgtgaaaaagaaaaattggcggctaatgtacatcaaaaatatcttgaatcttattctccggaatgtttctaccatcgacatcttgaaatttatcaaagtcttgtggaatcgaaatcaaaaattaagcatcatgagtaatagagaacgaactatcgaatccaaaggtagaatagaattcatcgacttggcaaaaggtatctgcattttgcttgtagtaatgattcatgtgggcgtgcctgaatacatcccagggctttatgcagccaaagtgcctatattctttcttctttcaggattatttttcttaaagaaagttaatcgggggggg

SEQ ID NO: 3099 - DNA, 12761 bp, Unknown
  gut microbiota DNA sequence
tcatgttttatgtgatagaccgggttgcaccgaacgtgttgggtgggaaacaagatttttctatcatcgacgtgttccgacagcgtaatctttttaatggtcctttatggttcctgatatgcttggctgaagtggaagcattgctatacgttgtctggaaatgcattcggacaaatatgatgaaatgtgcgttcatctcctcgctggcaatactgggattttcactcgcttcatacaagatttttattcccatgtggcttgatacggctatggtggcctcgctgtttttctattttggcatacttatcagcgaaaccaactttttgataaaaggaacgaaaagtctctatttagtactcggagcggttatctgttatttgatatacatattcttcccggtaaagatttcaatgagtgtcaactactacagtaatgcgtatctgacagtcgtatccggcatggcgatggtgggttttatattgttggtgtgcaaacttgtcaataagatttccgtaatcaattggattggaagaaattcattggtactcttatgcacacatcatttggtatataggcccataaaatattttctgattcatttcggttatgattatccgttactcttatttatcctaacaatcatcgtagagattcccataatcttcattatcaatcgctatttcccggtattagcgggaaaaggtaaactggttgtaaggtcttaaaccctgatagaatatctttttttatgaaaatcgtaaaaattctcggaggtctgggaaaccagatgttccagtatgccttgttcctttcattgaaagagcggttccctcatgagcaggtgatgatagatacatcctgtttcaggaactatcccctgcacaatggttttgaggtagaccggatatttgcacaaaaagcccccgtcgcttcatggagggatattttgaaagtggcatatccatatccgaattaccggttctggaaaatagggaaatacattctgccaaaacgtaaaaccatgtgcgtggagcggaaaaacttctcctttgatgctgccgttttaacacgtaaaggagactgttactatgacggttattggcagcatgaggaatatttttgcgacatgaaggaaactatttgggaagcattctcctttccggagccggtcgacgggcggaacaaggaaataggggcactgcttcaggcaagcgacagtgtttcattgcatgtccgccgcggggattacgtaaaccatccgctttttcggggaatttgtgatttggactattataaacgggcgatacactacatggaagagcgggtaaatccgcagctgtattgtgtcttttccaacgacatggcttggtgcgaaagccatctgcgtgctttattgccggggaaggaggtggtgtatgtagactggaacaagggtgcggaaagctatgtggatatgcggttgatgagcctgtgccggcacaatatcattgccaactcttctttctcctggtggggagcctggctgaaccgcaatccgcagaaggtggtggtcgcgcccgaaaggtggatgaactcaccgatagaagaccctgtttctgataaatggataaaactataacatagaagatatgaatattgtctatctctttttgacttataaaaacccggagctgctgcttcatacaatacagcggctaaaagctcctcatgtggagttttacgtacatgtggacgcttcatccggagaggacttttcatgcctacaaggaatagaaggagtgtatgtatctgtaaatcagtataatataaaatgggggggatgaaatagctttcactattctgtattgcctgcgcgatattcagcgaaggtgtcatgctgactacattatactgatgagtgaatctgactatcccatcaaaagcaaccggtatattcggcagactttggcggaaaagcggaaagattttatcacgattacgccattgccgcaccctaatccgcttcatacaccggaaggccattggctggagggaggaagaaggcggtatgaatgctatgctttaaggctcaaggcaaattcgttggctactattgagcctaaaagattcgacttggggaatttcaggcaatttgtgaaagtgatgcgcgacaatcccgcaaagttactccgggcattgaggatattttggcggtatccccggagaaagcatcccgaatatctgcggccttgcggaggtgaattgtggttcatattgagaggggaaaccgtagataagattgtggacttttgtacccggcatccggattatcttgactattgcaaggatacggcaaatttggatgaattattcattccgacacttgtcaattatctggtgccggaatcggagcgagagaacagcactttaaggtatatcaactggcaggaaaacggaggctcttctcctgcttacctgacgatgaatgacaaaaaactgttgacagagtgtattttagagccggataaactatttgtccgtaaagtgcaagacatggaagtgtgccactttatagaccaaaccgtaagagaacattacataaacccataatcatgatgaatcatcgtttgcattacatcgacaacctgaaaggcgtgctcattcttcttgtcgtgttaggacattgcatccagtgtacagacctggacttcgaccacaatgccgttttcaggtatatccattcttttcacatgccgttgtttatgtgtgtgagcggctttgtgagttacaagccggatataaaatggcagacggtgcagaaacgtttcaggcagctgatcataccctttttggcatgggcggcggttagttgctgcgtacatcttgacccgacgctgtttttagcgaaagtagtacatcctgatagcgggctatggtttctgtgggctttattcttcatcgtgctgctgatgtggctgtgcaattgggtcgttgcgtgcctgaaggtcaagatagaatatgtggtctgtatcttttccttgttgatgatgggcataatggtcgcattgaaatttaagctgttcggttttcagtttattgcttggtattttccattctatgccataggctttttcgggagaaaatatcaaaacctttgggagaaacagggacgcattggttctttgtggctgtccatcttgttcctgtttatggcatactggtggatgcggaaagaccctcctttgtttatgacacaaaacagtcatgtgatatataactacgcatacaaatttgtagtagccattttggcaattgttgcatttatacccttattcaagtcctatctgaatagaacaatgttaataattactaaaatggggggggtaacattgggtatttatgctatccacctaactgttattactctacttatttcctgtcttgatattgataccctacaactgccttattggttatgtgtatgcggtatgtggataatggttttaataataagctacttgtgtcatattctaattggaaagaaccgttgcttgtctttgttgctcttaggtaagtaacaatctgtatatctacatttatgaaattctctgtatgtaagcactcaaataatggctcaaacttgaaaggttttactttcagtaccagagtgagctttgcctcatggagaatctctgcagtccttctgtttgaggaataaagttccccataacgtgttctataagtggtataaggacacttgaaaaaatcttaagaagatgtagggactatgctaatatggtttttggcaaaatcgctttggctacgagccaatgttaaatttaaaacagattttcagttttataaatctataatataatgaaggagttcagtgtattgatttcagtctatgcacgtgagcagagcgattatttaagatctgccttgcatagtgtgtttgaacagactgtgccacctacagaagtcgtattggttgaagatggtccattgacaactgagctggaggctgtcattaccgatttttgtgagaaatataacactttgaaaatagtaaggttggctaagaatatggggttgggcaatgcgctgaatataggcttatccgcatgtacttatgatttggttgcacgtatggatagtgatgacctatcgttagctaaccggtttgaagctcaattaaaagtatttgaagaaaatccggaagtttctgttgtaggaggatggatttctgaatttgataatgatccccaaagtataatttcatatcggaagcttccacaaacagatagagagcttagaagaatgtgtcagttgaaaaatccgttgaatcatatgacagtaatgtttagtaaaaaagaagtgcttgatgcaggaggataccagcatttttacttgtttgaggattactggttgtgggcaagaatgataaagaatggggtgaaattgtataatgtacaggacgtgctggtcaatgtacggggcggaagtgctatgtctgcaagacgcggaggatggaaatatgcgaaaagtgaaatacggtttcaaagaaaaatattgcaaatgggcttaatcagtttacatgtattcttaagaaatgtatgtgtccgtttttgtgtccgtatgatgccaaacggtttgaggagtttggtatacgaaaaagtattaaggtaattctttcaattttaaaaaatatggggtatagtgaggacttcattccggacggaatgaatgcttttgagcgtaatgtaaagcgaataggggattgcattattgcgggagttttattattaatattttctccattgttcttaatctgttatctggtggtgaagcgtgaggatggcggcccggctatcttcaaacaggagcgtgtcggtcgttttggccgcccgttttatatttataagtttcgcagtatgaggctggatgctgaatctatgggacctcagttatataaaggcggaagagatcccaggttaactaaagtgggtaaatttttacgcgaacaccatttggatgagttaccgcaactttggaatgtcttctgtggtgatatggcttttataggcccccgtccggaacgtaaattttatattgaccaaataatggaacatgatccgcgttaccgctttttatatcagattcgtcccggggtaacttcgtatgcaacgctttataacggttatacagatacgatagaaaagatgttgcgtcgcttacgttatgacttgttttatctgcaacatcgctcctggtggtttgatttaaaaatattaataaagacctttatctgtattgttttcggtaagaagttctaataaataacagtaaaaataagatgaacaaattctttttaattgtattgctggcttttgctatggccggttgtcagtcttataaaaaagtcccctatctgcaggatgcagaggccgtatcgcatggagttcagaacgaacagctgtatgatgcgaagataatgcctaaagacttgttgaccattgtggtgtcatgtaccagtcctgaattggcagctcctttcaatctgacagttgctacacagggtaatgttgcttcaaactatacaaccgctcagccggttctgcagcaatatctggtggataatgaaggaaagataaacttcccggtattgggtgaactccatgtgggagggttgacaaagaaggcaacggaacaaatgattgtagaaaagttgaagccttatataaaggaaattcctattgtgactgtccgcatggtgaattataagatttcagtgatcggcgaagttgcccgtcccggcacttttactatctcgaatgagaaagtaaacttattggaagcattggccatggcaggagatatgaccgtatatggactgcgtgatgacattaaattaataagggaggacgctaacggcagacaggagattgtaaccttggatttgaacaaggcagagacgattctttcaccttactactggttacaacagaatgatattatttatgtcactcccaacaaggccaaggcccgtaattcggacatcggaagcagtaccagcctgtggttctccgccacttctatcctgatttccattgccagtctattgtataacattttaagataataccggaacaatgaaagaggaactaccaaacgagaaattgcgcgaagcggatgatatggaaatagatattaaggaactgcttttcaaatgcctgatccactggccttggttcgtaggaacggtggtggcttgtttgattgccgcctatgtttatttgtatgttgctactcctgtatataacatttcggctacggttctgataaaggatgataagaaaggaggagcctcaaataatgtgggcggtttggatgaactgggccttagcggattaatcacttcttcgcaaagtatagataacgaaatagaggtgctgcgttccaagacgcttgtaaaagaagttgtcaattatctgaatctctatgtgacttataaggatgaagatctcatcccttcgaaagagttgtacaagacttctccggtgcaggtaaacatgactccgcaagaagcggaaaagctgaaaaaagacattgttgttgaaatggtggtacagccacagggcagtttggatgtgaacgtgaaaatggatgatagggaaattcagaaacatttcgaaaagttgcctgccattcttcctactgaccggggaacgatttctttctttcaggttactgattctatccctgtggagggggcttcttcagttcagggcgcacggcatatcacagctaccattagctgtcccatgaatgtggcaagaggatattgtggaaatttagttatcgtgcctacctcgcaaacgacttctgtggtaacggtttccttgaagaattccagcttgcgtcgcggacaggattttatcaatcagttgctggagatgtataatcgcaacacgaataatgacaagaatgagattgcgcagaaaacggcggagtttatcgatgaacgcattggcattatctcaaaggaactggggagcacggaagctgacctggaaactttcaagcgtgatgcgggaataacggatttgagcagtgacgcgcaaatcgctttatccggtaatgccgaatatgagaagaagcaggtggaaaaccggactcagatcagcctggtggaggatttgaagaggtatttaagtcatagtgaatatgaagtgttaccgagcaatgtcggcttgaaggacgcggtccttgccacgcagatcgaccgttataatgagatgctcattgaacgtaagcgtctgctccgcacttctacggagagcaatccggctatcgtcaatttggataccagtatccgtgcgacgaaggcgaatgtgcaggctaccattgaaggcacgctccaagggctgtttataaccaaagctgatctggaccgcgaagccaaacgctatatgcgtcgtatcagtgacgctcccggtcaggaacgccggtatgtgagtatagcccgtcagcaggaaataaaggccggattgtacttgatgttgttgcagaagcgtgaagagaatgccatcatgctggctgccactgccaataatgcgaagataatagatgaagcaatcgctgatgatattccggtatttcccaagcgcggtattatttatttggttgcattggtcttgggatttgtgatccctgttgccgttatcttcctgattgacctgacgaagttcagggtcgaaggacatgcggatgtggagaaactgacgagtgttccgattgtgggtgatatcccattgactaatgagaagaacgccaaagacggttctatcgccgtattcgagaaccagaataacctgatgagcgaaactttccgtaacatccggacgaatatccagtttatgcttcagaatgacaggaaagtaatccttgtgacttcaacggtcagcggtgaaggtaaatctttcacttcggctaatctggctatcagcctgtctcttttggggaagaaagttgtgattgtaggtcttgatatccgtaagccgggattgaacaaggtttttagtctttcgagcaaggagaaaggtataactcaatatctgtccaatccggaaatggatctgatgagtcttgtgcaaccgtccgatgtgaataagaacctgtttattcttccgggcggaaccgttcctcctaatccgacggaattgttggctcgtgatggcttggataaagctattgatattctcaagaacaattttgattatgtaattctggatacagctcctgtcggtatggttaccgatactttattgatagggcgtgtggctgatttgtcggtatacgtatgtcgtgccgactatactcataaagcggaatatacattgatcaatgagttgtctcatgaacagaagttgcctaatctttgtactattattaatggagtagacctgaagaaaagaaaatatggctattattatggctatggtaagtatagcaaacattacggctatggcaaacggtatgggtatggctatggttatgggcaggaaaaataaagataaaacagctatgggaggcagtgaagtactatttcccgtagctgtttagatatttgaagctatgctggttaggaaactatatagtgatatatttcttgaccacaccctcgcatcaggataatgactgatgcaaattttccactatatcgactgtctgtgaagatcgttgatattttttataattctgcatattcttttcgacagtcaaaacaaggacaggctttatgaatcgaagcactaagttgataatgccccaggatttgtgctttcggatactgatgcctgagtatagttaacagatcgagtagtgtaaaacgctgcgcctgggtcctagtgtctgccgggtatccattttcatccagtccgccttcatagcaaatgcctatgctgtgccggttaaagcctcgcacatgcgcacccggctctgataccggacggcagtgatgaagttctccgtccctggtgatataaaaatgatatccgatgtatttgaaaccacgttgcaaatggcatttgagtaattgttcttctgtaaaggggatgttggcacgcgtagcgctgcaatgtactacaatatattgaatgcttcgtggcacatattcttcttctgaagaaaattcttttaactctttcatcttattcgttcgtttagatatgggctacacaagaggttacccccaaggcagagatgattgaagtggctaccgtgataaagatttgtaaaatttgtttccaaactgattttttcatgacttttgattttaaataattgaaaataaaaatgagattataaaaatagagttgacttgtgagttgccagcattaaaccggcaactctgtgaagcataaatatcgtgttattttatatgctcgggtccggtgtttgtcctttgtcttcatccggatcaggtactacaacgtcgtcaccttcacttccttcacctttctttacttgtgtatatttcattgccttacacatgtccagaagcatgcttcccggatgaaaacggacacgggaaattttgatacaggtggccgccttgaatttctctgccgtttcgctggcattaccagtaacaatcgttacacggaaactccccatatcgccaagcaggacgatattacccaatgacaactgattcttcatttccaacagaaactcagtaatacatcctttcaactcaccgatagaataagaggaacgctctgatacacgactgataacttcgtctgtatccactctgcgattgctacgagccattgcataaaacttggccggctcttgtggctttaacggatttttacgttctaccacgacatacttctgtgccataaatctttcttttttaattgattcttaattcttaaatcatatctctgtaatcgattacaccgcaaagataccatattgagaatgggtgatgaacgtcagtgaacgttattgaacggtggttattttatttgactaaatacttgctgaggtatgtaaaaaacactatctttatatcattaataacagaataagtaggataaaatggaagaagtaaaattttatgtgagatgctatgataagattgagttggcgagaatgtatttcccgaatttgagtaatcccgtatctgtagcaaagctccgtcgttggatgcgtaattgtatgcccttaatggaggaacttatggcaggagattttcatccgaaaatgaaaatgttcagtgcgcgggaagtcaggcttatcgtacgttatttgggggaaccggacggatacgttttcatgcatgaacatgcggatgtaaaatgactgctcttttaaatgaaaacgaccgcttcttttcttaataaggagcggtcgttttagtgtaaacatacagtcgtttacgttgaattgaccgctcgatttatataagtcaaacggtcggttgaaacaggtcaggcagtcgtattctttttcatccaggctatgccgggcacgtagtcctccagttttgtcatactcgggtcatgtctgaaataaagttcttttgtcgtaccgttgcggtgtttgacaatatctatcactcccagtccttcagttggatacgtacttttacggtctgtgtcacgtccggaaagagcagggcgtgaaagcatcaataccagatcagcgtcttgttcgatagctccgctttcccgcaggtcgctcaaactaggacgactgtcaggacgcccttctacattacggtttaattggctgagtagtatgacgggaatatttagttcttttgccagcattttggctttacggctggcttgggctacttcctgctcgcggttgcggttgttccgatcacttttcatgtcacataattgcaggtagtcaatgatgacaccgtcgcattcacctttgctttgtagcagtttggcggaagaacgaacgtaatccatactcactgacgggttatcatcaatgtgaataggtagacgggacaactcagctgctgcttcgtgcagttgcctctgttcactgggtgtaagttggccgctgcgtacattgtcggggttgacattggtggtagcagccagtaaccagcggtcacccaaacgttctcctagcatctcgagactgaatatagctatgtgataaccggcagaagcagcggcacgcgccaggtgcagggcgaatgacgttttacctactgcaggacgggcagcaatgactacctcgtcacctggttgccagccgcatgtcaggcgatcaagatcggagaatccggtaggaagccccgttataccattcttgttggagctgatgcgcgcttctatttgtttaatcgtatcatccatcagttgtaacatggagcgtagatgttcggtagttccacattcattttccagtcggtcaaggagggtatgagcgtctgccaatgtatcgtctatatcggtggtttcgtcggcagccaacgccagaagcttgtggaatcccagaatcgtttcacgacggatatatttctgtttaagaatccgtgcatgatattcgaggtgagcactggaagctacacgcccgctgatgtgtgccagcgtgtaaggtcctccgatgaattcaagtttgccgcgtcgggcaagttcttctttgactgttatgatatctattttctgtccgttgcgatacatactttgtaacgtagcgtaaatctccagatttttttcattataaaaagcttccggtcgtagtatatctgcaatcaatgtgattgctttgctttcaatcaggcaactgccaagtatgatttcctcaagttcggcatcctgtggatttataatttcactcattttctttactaataatcatattcattcaggaatgctttatcggatagatatgtactagcctgcatacagtactttgtatctgtcagattgtcataatattcatcaatattcttcaagctcaggctgcgttcgtggggagacaatttcttccattcccggcgtgcccggccgatattggttttcggcttttgagttacttcatgatatttagcccagaatacttcgaaagtaactccatttgcttcttcgtgggcattctcgcgacgtttctgtcctacaagcagatcataactggggatacgtatgtgagtgatatacggattaataactctttctataatcccttcttcatacattttattgaagaaatatcgtgtccggctacgtttccaaccaaataatttcgcccaatgagcaatggatataaccgattcgccccgccgacattcaaaagtgtaatgtttcacagtacattctgttgtgctgtaattgacgtgagttagcacgaggatgaaggcgtcgaagtatcctgtcgcaccttttgtctttttcatttgctcctcaaacaatactttagggaaaaggagatatcccttctttagcatttctgctgttgatttaatcataagtttacttatttaatacatataaaatatttcagtcgtcttgggaggtacattttaggacctctttgagcgaccttttttgattactctcaaacgtcgtggtagaagatagggggagtatatggtattttatgcttcgacctctctttggcccactaatatatataataaaaaaagaatgtattaaaatacattatatcttcatcctcgactttcattgttcgctatatttaattttcggcaaaggtataatttgtcaatttgcctgaaaaag

SEQ ID NO: 3100 - DNA, 5412 bp, Unknown
  gut microbiota DNA sequence
tgtcatagtgaaaatcttatgcctaaagatacaaaatctttaggtaataacaaagccccagcttgtgaaagttggggctttgtgcttaaaaaaaagaaggtgcgcattttgacacacctccttttttatctcgaatcttaaagttaatcttagttgttaactcttttttctttgattctagctttcttaccggtaagagcacgcaggtaatacaatttagcgcgacgaactttacctaccttgttcacctcgatgctgtcgatagccggtgattcgatggggaaaattctttctacgcctacagttcctgacattttacgtacagtgaaacgttttttgtctccgtgaccagcgattttgataacaacaccacggtacaactgtacacgttctttgttaccttcaataatacgatatgctactgttacagtgtctcctgctttgaagctcgggtgctgttttccggtagcgaatgcttcttctgcaattttaattaaatccattgttgttattattaaattgtttcatcgttacaacgcaacataccaagtatctcgtctcttgacagcgattgcgcgaaagcggtgcaaagtaacaaattatttggcagatagccaaatgttttttgtatatttgtcgcatatctaaaaaacaacgagcatgaaacgaacttatgtaaagttactgactgtggcaggcttgacgggatgcttcctgtttacttcctgtcgttcagcacaagaaactaccgcccgctatgaaatatccaaggtggagggcaacatgattacgattgactctacttgggatgctaatcctgacaaaaaagcgaccaccgtattaaaaccctacaaggataaagtagacgcgatgatgtacgaagtcatcggtaccagtgaaatgaaaatggataaggggacccctgaaagcttgctctctaatttggtggcaagcgtgctgcaagaagctgccgcgcaagtgttgggcaaaccggcggatatgggactggtcaatatgggcggattacgtaatatcctgcctaagggagacatcacggtaggtgctgtttttgaaattcttccttttgaaaattcattgtgcgtcttgacgatgaaaggtacggacatgaaacgtctgtttaaagcaattgcttctttacatggagaaggtgtaagcggtatccgtttggaaatcaataaaaaaggagaattgctgaatgctacgatcggtggaaaaccggtagtggatgaccagctttataccgtggctactatcgactatctggcagacggaaacggacgcatggatgctttcctgcaagctgaaaaaagggaatgcccggaagatgctactttacgcggattgtttttggactatgtacggaagcaaacggcggaaggcaaaatcattacgtcgaagttggacggacgtataaccgtaaaataagtaaaaaggagaatctaaaaatataggatatgaagagatttcagctatcattatgggtatgccttgtagtgtgtttcggcttttcaacttatgcacaggataccaaagaaattataattttgcagacaagcgatgtgcatagtcgcatcgaacctataaatcaaaaaggcgaccgtaactatgacgagggcggttttgtccgtcgtgccactttcctcgaccagttccgcaaggaacataaaaatgtgttgctgttcgactgcggggatatttcacaaggtacgccttattataatatgttccgtggcgaagtggaagtcaagttaatgaacgaaatgggatatgatgccatgactatcggtaatcatgaattcgattttgatctggacaatatggctttactcttcaaaatggctaaattcccggtggtttgttccaattacaatctggacgctacggtgctgaaagatttggtaaagccatacgttattctgaaacggtttgggctgaaaatcggtgtctttggactcggagcgaaaccggaaggtttgattcaggcaaataaatgcgtcggagttgtttatgaagatcctattgaagtgtcgaacaaggtagctgccttgttgaaagagaagggatgcgacctcgttgtatgcctgtctcacctaggcattcaaatggatagggagttggttgcaaaaacacggaatatcgatgtaattttgggcggacactcgcacacttttatgaaaggaccggagaattatcagaatgtggatggaaaagaggtacccgttatgcacacaggaaaaagtggagttcgggtaggtcgtctcaacttgactttgaaacgtaaatgagaatatttccctttatcttagttgttttattttttattttagccggatccgtttcgagtccggcccagaatgctgcttctgttgaacctttgctcttatataaagcacagcaggataagaattgccggcattgggtcgattcggtgatggataagttatcctttaaagaaaaggtcggccagttgtttatctataccattgctccggtaaacaccaagcgaaatttggagttattgcgtgaggctattgatacttataaagtcggcgggcttctcttttccggtgggaagatgcagaatcaggttgagttaaccaaccgggcacaacggcaggcgaaagttcctgtgatgatcactttcgacggggaatggggggtggcgatgcgtttgcgcggcacacctgtgtttccacggaatatggtgttgggatgcattcgtgacaatcgcctgatttatgaatacgggcgtgaagtagcccgtcaatgccgtcagataggtgtgcaggtgaattttgctccggtggcggatgtgaatatcaacccgaagaacccggtaatcaacacccgttctttcggagaagatccgatacaagttgccgataaggtaatcgcttatgcttccggtctggaaggaggaggagtattgtctgtgtgcaaacacttccccggacatggagatactgatgttgattcgcataaagctctacccgtacttcccttcacgcgcgaacgtttggacagtgtcgaactctatccttttaaggaagcgattcgtgccggagtaggtggtatgatggtgggacatctgcaagtcccggtcattgagccgatcggcgggctcccgtcttctttgtctcgcaatgtcgtatacgacttattgacggatgaactggcttttaaaggattgatttttactgatgcgcttgccatgaggggcgtatcgggcaatgggaatgtcagcttgcaggcattgcaggcaggtaatgacatggtactggctccacgtaatctgaaggcggaagtgccggctgtgcttgcagctgttgaaaaaggcgaactgagccgggaagatatagaaagtaaatgccgcaaggtactgacctacaaatatgcgctgggacttagcaaaaagaagtacgtgcaattgtccggcctggagcagcgggtgaacagcccgcaggcgcgcgacttggtgcgccggctgaacctggcggcaattaccgttctgaataataaagatcatgtactgccgctacatacggacaaagaccagaagatagctttgctcgaagtaggcgacccgggtgagacggaagcattagcaaagcaaatgacacgttatgcatctctggttcgtttccgccttcgtccgaaacagacagaagaagaaaaccgtcgattatatgattcattagctatttataaacgagttgtagtagctgtcagcgaacaacgcctggcttcttatcagccattctttacgaagtttgctcccgatgctccggttgtctatcttttcttcacccccggcaagatgatgttacagattcagcgcgcggtgagccatgcttcggcagtagtgttagcgcatagccacaatacggatattcagcgtcaggtggcagacgtcttatttgccaaagccactgcggatggaagattgtcggcgagtttgggcggattattccatacaggtgcgggggtgacaatcactccgaaaactcctttgcattttgtacctgaagaatacggcctttcatctgtgtcgttgaagcggattgattctgttgctttggacggtatccggcaaggagcctatcccggttgtcaggtagtagttatgaaaaatggtcatgtaatggtcgataaagctttcggcacacatacaggaaaaggaagtgcccgcgtcgaatcatcggatatctatgacctggcctcccttacgaaaacgacggctaccttgcttgctgttatgaaactctatgataaggggcgctttaacctgacagataagatttcggattatctgccgtttttgcagcgcaccaataaaaaggacataacgattcaggagatcctgtatcatcagtccggtctgccgtcttggctacctttctatcaggaagtgattgataaggatagctataaaggccgtttgttcagtgcgcgtagagatgcacagcatccggtgaatataggaacaaatacgtgggcaaatccgaatttcaagtttaaggaagaatatgtatctccaacgaaaaccggggattataccattcaaatctgtgataatctgtggttgaaccgatcgttccgcaaggtgatagaagagaaaattgtggaagcgccgttggggcagaaacgttatgtatatagtgatattggatttatcctgttgggaatgctggttgaacagcttgcgggaatgccaatggaggcatacttgcaaagcgagttttacgaaccgttgggactggagcgtacaggttacctgcctttgcgtcgtctggcaaagtcggaagtcgttccttccaataacgaccgcttcttgcggaaagataccctgcaaggattcgtgcatgatgaggcttccgctttcttcggcggattggctggcaatgccggattattctctactgcccgcgaagtagcccgtgtatatcagatgttattgaacgggggagaaatagacggccggcgttatttgagcaaagagacttgccagttgttcactacttcggtttcaaagataagccggcggggactgggatttgataaaccggatagggaagactcgaagaaagggaactgcgctcccgatgctccggcagaagtctatggtcataccggatttaccggtacgtgcgcatgggtggacccggttaacgaactggtttatgtctttcttagcaaccggatttatccggatgttaccaatcgcaagttaattaggctgcacatacgcgagcggatacaggaagtgatttatgatgcgatgaagaaaaagtaatccttccgcactgaacacaggtataaaataaaggagaaggtgtgtcgtaatacacgatgcgccttcttttttttcattgactataaaaatcggttcat

SEQ ID NO: 3101 - DNA, 569 bp, Unknown
  gut microbiota DNA sequence
atatgtcatgcaaagatagccattttcagcgaattgcgggctatggttgctcaaatttatacttcaatccatattcttccagtttattatagagtgttgtcctgcctattccaagcaattcggcagcgaccttccggttcccgtcagcctgcttcaaagcacgcagaatccgctctttatcttcctcgtcgttgcgtagggagaagccggtaacagaggttgtttcggttatcccaagttccagatgctcttttgtgacaagtcccgtctgagcctgcaacaccgcacccatgattttctgtcgaagttcgcgcacgttgcccggccatgaatgggtcagcaacgctttccgtgcttcggaactgaaaccgctaaccttgcactccaattccttattggcaatctcacggaagaactccgccagcggcatgatgtcctcctgacagtcacgtaagggcagaacggttatttcaaagtcatgtaggcggtataacaaatcctgccggaaacgcttttcattgaccgccttttccagattctcgttggtggcggcgatgatgcggacgttg

SEQ ID NO: 3102 - DNA, 295 bp, Unknown
  gut microbiota DNA sequence
gatgagggcattaccgtcattatagccaacggcaagaaagaccatattctggtcgatttgctgcaacatccggcagagacggtttgtacgcgctttattccggcagaaggcggagtatccagcgtgaaaaagtggattgcccatagcgaaggctttgccaaaggcgagttgcatttgaacgaacaggccgtgaaagtgttgaaaggacagaaggcggtaagcctgcttcctgtgggagtggtccgcatagaaggggaatttgaaaaagatgatatagtgaaaatcatagaccacc

SEQ ID NO: 3103 - DNA, 102326 bp, Unknown
  gut microbiota DNA sequence
tgctatcataaaatgtagacaagagtcttctacaaattattgttatacacaagcattagctaagtatgaaaggagtaaaagaacatctgacagagtatacgaagaatgtataaaaaaataattatatatatagtcttgaataatgtaatgtggcttaccagcattgcaatgtgttatttagattgctttattgacaacttaaactacacatttcaagatttcctaattatcttctttgaacttctcgcacgtataacacttgtaataggagcaatcagtatattcccacaagaaccatactctaataaaagaatgtggttctattacatcatcatgggtgggagtttgactattattgacacatttatacgattggcaggtactttacaaaagttattattttaattccttttgaagaaaaatgtccaaatccttgtcgtcaagccctaaacgctttcgagcacgagacctcatcgtacgataagtcccatcagtaatacaaaatatggataatatttcctctttcttcttatacatccgaatcaacacacataatacaatatctcgcggtggaagttggaaatcctgcttcttaagccaattaaaaaactcaggatcaacaatttggcatccttccaccagcaaaagatagtctttggccgagaattgagcaatagattgattctctacgagcttacgcaagaaagaaattcctttctgttctggtggaggagaatctagcaattgctgtattttttgagcttgaagaatagcctgccgacgttcgtccgccaatttatgatacagtgtaatagagacttttattgtagcggctaccattataccaataacggctaacacaggaatagtatactcagataataccggtgctatttccatatggatttctctcggcataatcatataaatttcatctgctgtaatcaaaataaaagctgcaatgaactgccaatctatcacctcagaaatgccaaaggtttctcccttctcatgaaatgtccacagtaatgcccccacaaagagagtcaaccacatcaatagatgcatagaagatgagaatgcatcaacatacattccaggaaaaaatgcctgaaatatataagctgccaacagaatcaaacaacaaagcaaacctcctgacagtaactgtttaaaagaataagtcgaaaatttcattacttactttatcttgtgctcttgaattacaaatatagcgaaaagaatattcacatagtcaatcatcatcaatattctttttcacaagataaaaaagatgtattatcaaacgagataattgcaccttcatcgcttttaaagcatgttacacattaggttatcccctcgcttttttttatcgaacagctttacagaaacaatcttccaaatgatcattcacaaaaccggcagcctgcaaaaaagcataacaaatagttgatccaaaaaacttgaagcctcgctttctcatgtctttgctcatagcgtccgattcgggagatgtagccggaacctgacttaaagttttaaaattattgacgatagcccgttgtttggggaagaatgataaggtgtatttgtagaaactaccgtactctttctgaatagctataaatagttttgcattattgattgtactattgatcttcaaccgatttttgacgattccatcatattgcattaaccgttcgatatcttcctgtgtcatttgtgctactttctccacatcaaaatgatgaaaggcttcccggtatccttcacgctttcgaaggatagtaatccaggatagtcctgcctgagcactttcgagtaccaagaactcaaatagagttctgtcatcagtaacgggttggccccattcttcgtcatggtattttaggtataattcatctgttccggcccagccgcaacgtgcatttatcagatcttccatactcttttatattattattaagcagtcaatatctaaaacatcagatattgactgctcacatttaacgggattatttctgttattacaaatacccctataacgaaacgctcggaactaatctgtattacttgtccaccgagaatttaaaaatgcactggctcatgtatttctcgcccggacgcagaacagccgaaggccattcaggcttgttcggagtatccggatatttctgtgtttcaagacatacggaagcacgttgattataggtaatacctttctttccgctcagcgaaccatcaaggaagtttccggcatatacctgaactcccggttcattggtatatacatccaatacaatacctgttttctgagatttcaatgaagcagccctacggttaatatcgcctttggcattcaatacccagttgtgatcataaccattaccgttcttcagttgcacaaagtcgaaatcgttgatacgttctcccaccggcattggtgtacggaaatccattggagtatcttctaccggaactatttcaccggtagtcataaaggtgctgtccaccggagtataataatctgcatcaatagtcagcagatgctctgcgttgctgcccgcatcgccatccagattaaaataagagtggttggtcatattgacaatagtcggtttatccgtctccgcttcatactgaatatcgattgcattgtcgtcagtcagtttcatcagcactttacaagtaatgtttcccggaaaaccttcttcaccatcttttgccacataagtcagttgcaattcctgcggattcaattgtacggcgtcatacacccgatactggaacccttgcggacctccgtgcaggcaatggccgtagttattacggggaagctgatattctacaccgtccaacgtaaacttaccctgattgatacggttagcataacgtccgatgcttgcaccgaagtcggaaggtttgctgatataatcctgaatggaatcgaaaccaagaactacatcacgcatctgtccgtccttatcgggaaccatgacagaaacaatgcgtccgccaaagttcgtgatgcaaacttccatattgttcttgttgcgcagaatgtagagatcggttttctttccgtccacttccgtacggaaattactctgtaatagaccggaatccgtagctttctcggctttcggtgtacaagctgccattaaaagggcggcaactgcccatacacataactttttcatggtgttttattaattaattactattaaacagacttaccaaaagaaatctaaaattcattctacaaagatgagaaaaaactaattgtttttttaaaacaaattgttcaataaaggataaaaattaatcattaattcaacttttaggataatacattagaaaaaagatgccaaatacgcccttcatttgcaataacttacctagaaaagatttagttttgacatatttcttgtatacgtatgccttacattgtttgactatcggttcagccaaggttccggattcagtttctctttctcccggcgtaactggaagtgcaataccgttcttccattatcagtgccgtcagagaaaacttgtccgatagattgcttggtcttcaccatgtcgccggactttacagaagccgatgataagttacagtaaacggaaatatagttgccatggcggattagtacattaaataatccattcaactggaatactgctgcgacttttccgtcaaagatagcacgtgcctgtgctcccggctttccttggatatcaatacctttattatccagtttcacattacgaagaccttccacagcatattgtccataatggctggtgataatataagcaccggatataggcataggaagttttccccgattggctgcaaaattgccggacaattcccggtcggctttactcattgtataagtttccagaggcttcgagttcgttttaacggttgttccggttccggcagtttgactttctttaccctccgctttcttacgggcggcagcctcgcgtcgggcttcttcctcggcacgcttgcgggcacgttctatttcttctgcaatcaacttgtcaatgcgggcattcaattggttagcttctctccgtttcttattgatctcaccttgcaaccctctctgtttcttttgcagattggccacaagcgtacgtttttccttctcctgcgcttccagtttggtcttctcgccttcacgctctttcaacagactctctttagcggctttcacctgttcccgttccacctttttcttccgtatctgttcctgtttcttcaggatttcctcaccttgcaaccgttgataagtagcatattcacgaacatagcgcatacggcggtaagtctgcccgagattcttggcagagaaaataaacatcaatttttcttcaatcgacttgttcttatacaagtattggacagaagcctcatactttttcttcttatccttcaaatccttttgcaaaccgttcaactgacgttgcaaggaagtcagttcacgttctatcgcttccacgtcattattgatagcaatgatataacgtttccgctcctcgatctggccggtcaataccgccagactattcaactgactacccacatctttctttgtatccttcaagattgattccgtctcggagatctgcttttgcagcgcaccacgtttgctttccaactcacgaatcagcttgttcgactgagcgaaaagaggaattgccaaccatagacaaccaatcagaattacaaagaaatgtttcatcataagaaagctaccagcatttttactaattcttccaagggaacttgccgatatttagaagtaagttccgtaggagtcattgaaaattcttttgtcgagaactcataaagttggactttagccttttccaacgagggaatgcctatatcttttcctgacaattccgtcttcccaccgggcaaagaggcatccaacaatatcttctccagacgggaaaattctgcattcttcggcagcatgcccttcaattcatctttggtggcacggacaaaacgtttgttcatccggtctaccaatagcacaccgtcaggagtaacttccacacgcgctacttccgtacgcaagataggcattaataaggatatttgtacccgctcatgggttttcatcttcatagttcccccaacagacatacttcccccctttttaccgggaatagtcaattgaagtttggaagtcagatagctggacacctgaacattcttctccgaagtcgccaaatgcttcgagctcttacacccggccagcacaactacaaccaacaatagaaaaactattcttttcattctgcaatatatttcttcttttctattttctctttcagtgttttcgattcactacccatttccaatgctttcttccagtatttcagtgcaccttccacatcaccggtcataaaatagatatcaccgcagtgttccacaaccacatcactcttttcttcgtcactcttcattgcattatcaatgtagatacgagcttctgcatagttgcccttctcaaaaagaatccaagcgtatgtgtcgagataagtggcattgttaggttcggccttcaccgtcttgtaactcatttcttccgccttatccagatcgcggcgttccacggacaaataataagcataattattcaatgtaccaatattggacggattatacactaaagccgaatcataggctgcgtatgcttccttcatttgtttcttggtatgatagatatcccccataattgagtagaaattcgagactatttctttccgcgtgtcagtcgtcacacgttccagcgccttggtacaaacgctcaacacactgtccggctgttctgcctgatgataggcaatggctagataataatagaaatccaatgcatccggagtagcctcaatacccggttcgcagacttttataatctgtttatagtcttccttctttatcgccgcacttatcagcataagacgggcagctttattagtcggatccaaatcaacaacctgttccagtaccggtaccgcctccgcttccatacttttcgacaacagatattgtgcataaagcatcggaatctgcggatcatccaaatcttgttccatcatccggtcaaacaaggcgatcacttccgtactatcttttaccgatgattgttcattctccacaatcacctgacgcatgacactgatttttgtatccggagtaactttcttattcagcaataacgtatcgagttgttgctggtatagttccttctgacccgtctgttcataataagatgccattgaaaagagagccattggattatccggttctactgacaataccttctgataagcctcatatgcttcctctttttttccgttctgaagatatacatcccccagtatcacttgataacgcatatctgccggatattcattgacaagactctctatttcctgaaaagccttcttgtcatccttcatctgaagataaatacggaatttctccatcgacaactgttcattcttacctaagcgtttttccagccggttcagtgtagaaattacatcactgtacttctcctgtcgtccatagatgtcgagaagattgaacagaggatcttgcttggtcgggaaacgggttaccatttcttcaagcaacgtaacagctttatccaactcattctgttgttgatacagactcaccagcccttgactataccagtaattatcaggtgcataagtcacagccttttccaaggctgcctgcccttgcggcacttgacggagaaacatataatactgggatatttcgtaaagcgcagaagaagcattcgggtgaatgtccagacaatgttccaacaacccgaaagccgcgtcatactctttcttttctttcatccgcatggcttccagaaaaaaatagtcatacttacgctgttgctcctctgttaattgagaagccaaaacttcttccttctgaacttttttctttttatccttctttttcttaaccttctttgtaactgcattcgcgccaagagcataccccgacaccataaccgcacctcctgctacactccccaccacttgcacagccatgcaggaagtaagcagcaaagtacttaacaacgagaataatagtatccttttcatttttttcctgtgtgaccgaagccgccggctccccgttccgtttcatccaatacttccacttcctgccatacggcctgttcatgttttgctatcaccatttgtgcaatacgttcaccgtcttcaatcacaaaagtttccgatgacagattaactaaaataatacaaatctctccccgataatctgcatcaatggttcccggagaattgagaacggtaatccctttcttgatagccaaaccactacgcggacgaatttgtgcttcaaatccctgtgggagagcaatatatagtccggtaggcaccaggcagcgttgtagcggttccaatgtgataggttcggaaagattagcacggatatccattcctgcagacaattcagtggcataagccggaagcgagtgcttcgatttattgataacttgaatattcataaatacacgtttactatattaacgggcgaaaatacacattttgaactgaaaaatagttaagtttgcagttaaataatgtaccggcaactaatttgtgaatggtaaataacgaaataatgattaaaatgatgaattggaaccaattaatatctgcaaaacgcttcggaatggaagagttccatgaagaacgccaggaaaaccgttcggaatttcaacgggactatgaccgcctcattttctccgcccctttccgccgactgcaaaacaaaacccaagtattccccttaccgggcagtatcttcgtacacaaccggctcacacacagccttgaagtatcctgtgtcggacgttcgttaggaaatgacgtcgcaaaagcgattcttgagcgccagcccgaactgcaggagtctttcctaccggaaataggttctatcgtttccgccgcctgcctggcgcacgacttgggcaacccgcctttcggacattccggcgaacgtgccatatctacttttttttctgaaggtaaaggacaattcttaaaggacaagcaaccggatggagaacaactttcttcgatggaatgggaagatttgacacattttgaaggaaatgcgaacgcattccgactgctcacacaccaatttgaaggacgccggaaaggaggatttgccatgacttacacgacattagcttccattgtgaaataccctttttcatccagtcttgcaggtacgaaatcaaaattcggcttctttgtcagcgaagaagagagttttcacagaattgctacggaactggggcttactttgctcaacgaacacccgctgaaatatgcacgccacccactggtatacctggtagaagctgccgatgatatctgttatcagatgatggacattgaagacgcccataaattgaaaattctcacaaccgaggaaactaaagaactgctaatggcatacttcaacgaagaacggcaggcacatatccaaaaaacattccatatcgtaaatgacaccaatgaacaaatcgcttatctgcgttcttctgtgatcggattattaatccgggaatgtacacgtgtatttttagaacacgagcaagaaatactttccggcacatttgaagaagcacttatcaaacatatctccgaacgtccggcaaaggcttacaagcattgtgccgaagtttcgatcaagaagatttaccgctcacgagatgtactggacatcgagttagccggcttccgggttatcagtaccctacttgagttaatggtagatgcggtgacctcacccggaaaggcttactccgaacttctaattaaccgggtctccagccagtacaatataaaagcacctgcactctatgaaagaatacaggcggtacttgattatatatcgggaatgaccgatgtctttgctcttgacctctaccgcaagattaacggtaacagtctgcctgcggtgtaacgactttaggagtaaacgcctcatcctcctcacaaggcattttcaacgcatccggatgactttcaataaacgtctggatgtggcgcatgcgcttgtcctccaatatttcatctacagcaatcaggattccggtttcttctacatccccaaactcatagttgatagctgtgccaaacatacgcatagtgggactcaagctcatataagcatttaccaacggtggaatattatatcctaatttgcgaatctcacaattcaggatcttataatcttctttaaacgtattcttgcagaacaacgccttcagttcttcttcggaagtttccgattttaacgggtccattggagtcaccagatgttctttatcacagaaatgcttcttgaggaaataaagaatcatatcgcgaccgcgacggtgataactgggatacatggtcactttaccaaagaagtatttcacattcggcatgacaacagtcaacgcccccaatccgtcccaaagattatccaaagcaaacagacctttgcttccggcacgggtagactggtattcaagcgtcacaaacgagcgtcccaattcgattgtttgaggcagatattctttaataaaagtatccgaaaaatggaacatgtgggaagtagccagaatcggcgccccttgttcatcaaagcgcacatctgtcccgagcagataccgatatccccccagaatttcttccgcttccgggttccatacaattaactgcttgtaaggatgctccattgtgtcgtattcatcaatatccattgacaaacctgtccctccaccggcagcacggaaagctatctcacgcaaacgaccgatttccctcatcacattaggagcgttcaggtgagtaataatataaatctgattattactcttattcgtcattcgtaagcgtttgtcctccgtcaactctgccttcagcagttccttgcttatcggtttaataatatcttccatattccttgttatagttgttctatcagttacagtttatatacaatatcctttacgtattcagcccactgtgcaggtgttttcgacttatcgaaagtctgccagggaataggtttaccaaaggtgacagtaaaagttttatggcggtttttaaacatttcatccgcaagatacaacatagcgatgttaaacttaatccccaatgccttacaaatattggccagattgtagaagaaatcagaattcctgccgccaaagtgcacaggtatcacatcacgttttgtttgtacgctctttaccacaaatgtttttttccattccagatcacgaatcactccgttataacgacgcgagcacagcccggcgggaaacatgatcagttgattatcggactggaatccggcttccaccattttcgggaagtccttcgcctgcttccctgttttattaatcggaatacaaagcggagcaagtccgcgcaagttcatcagcaggtcatttaccagatatttcacttttccgtcatagtgacgccccagcacatagcccagcgcaactccgtcttgtccgcccagcggatgattggaaacgaaagtatacagcccgtctttgggaagattctcaatgcctttcacatctacttttgcgtccagaaagtccatacacgcttctagaaagtccactcccaccttgtctttcgattcatccaggaatatgtttatctcatcctgatgaacgattctttttaaataagaagtcacaaacttagggatgtacttatagtgcttcgaagccttcgtccgaagtatcttatcgacatcaatcaaaaataaagagtcatcagtcattcttttcaaataaaaatgatgccacaaaattagcggttcttttttattaatcgcaataatttggtagaaaatgcaggaattaagttcacatcgcaaaaaaacaacacctaaaaactatcaaatatgacctaaaatctatccgcagatagtttttcccctaaagaaagttggattcccccctaccggactccgggaaatgctgtaaacttgcatcatcgaaattattacaacgaatactcacaatttaaaaagcaacgtatatgaaaagtttaagcttcagaaaagatttagtaggagtacaagatgaactactccggttcgcttataaactgacaaccgaccgcgaagaagcaaacgatttgttgcaggaaacatcattgaaagcattagataacgaagacaaatatacgcctgacactaatttcaagggctggatgtacaccatcatgcgtaacatctttatcaacaactaccgcaaagtagttcgtgaccaaacatttgtagaccagaccgataacctctatcatttgaacctgccgcaagacggtagttttgaaagtacggaaagagcttatgacctgaaagagatgcaccgtgtagtcaatgctcttcctaaagaatacagagttccgtttgccatgcacgtttccggtttcaaataccgcgaaattgcagagaaactgaacctaccgttaggcaccgttaaaagccgtatcttcttcacccgacagaaattgcaggaagaattgaaagatttccgctaaaccttaactatataactttcaaacttcaaattaaataatttattaaatgtagatttttagttgtgtcaatggttaaaggcagaagtgattaaagtacttctgccttttttttctttactgctaagaaaaaaaagatttgccgcctgacaattcctttttccctatacagacaaaatcttctgtttgacaaagcatatttccccactgataaagacttatcaaagctacatcattttcaagcaaatagacatttaacaatctgttgaaaacttctctgaaagttttttatggaaaattgtggggaattgtggggaatttcatacttttacggtcgcttattataataaggtaatgatacgttttttagggaatattgaagccaaggcggacgccaaaggaagggtgtttatccccgccaccttcaggaagcagttgcaaattgcttctgaagagaagcttattatgcgtaaagacgtatttcaggactgtctgactctgtaccccgagagcgtgtggaacgaggaattaaacgagcttcggagcaggctcaataaatggaacagcaaacatcaactcattttcaggcagtttgtgagcgacgttgaggtggtgactcccgacaacaacgggcgcatactaatccccaaacggtatttacagatatgcaatatccacggggatatacgctttatcggtatcgacaacaagatagagatctgggcgaaggaacgggccgaacaaccgtttatgtcgcctgaggagttcggtgcagcattagaagaaattatgaacgacgaaaatagacaagatggagaaagatgaattgacataccacgtgcctgtattgctaaaagagagcgttgacgggatgaatattcgtccggacggaacgtatgtagacgttacgtttggaggagcaggtcattcgcgcgagattctttcgcgactcggagaaggcggacggttgctgggatttgatcaggacgaagatgccgaacggaacattgtcaacgatactcatttcacctttgtacgcagtaatttccgttacttgcacaattttctgcgttatcacaacattgaacaggtagacgcaattcttgccgacctcggcgtctcctctcaccacttcgatgacagcgaacgtggtttctccttccgtttcgacggagacttggacatgcgcatgaataaacgggcgggactcacagcggctgatatacttaatacatatgaggaagaacgcctggcggatattttttatctgtatggcgaactgaaaaatagccgcaagttggcatcagtaatcgtaaaggccagaaacggacagcagattcggacgatcggtgaatttctggaaattatcaaaccgctcttcggccgtgaacgcgaaaagaaagagcttgctaaagtatttcaggcattgcggattgaagtaaatcaggaaatggaagcgttgaaagaaatgttgctagccgcaaccgaagcattgaaaccgggcggaaggctggtagtaatcacctatcattcactggaagaccgtatggtaaagaatatcatgaagacgggtaatgtggaaggtaaagcggaaagtgatttcttcggaaacctgcaaacgccgttccgtcttgtcaacaacaaagttattgtacccgaccaggcggagatcgaaagaaatccacggtcgagaagtgccaaattacgaattgcagagaaaaaataataaaaggaagtatggaagaagcagtaaacaagaaggcagacgaaagcaagaagaagaaacgcacttcactgaaaagtatcttgggcggcgacattctggctaccgactttttccgtcgccagacgaagttgctggtactgattatggtatttattatcttctacatccacaaccgctacgccagtcagcagcagcagatcgagatagaccggttgaaaaaagaattgacagatattaaatatgatgcgctgacacgtagttcggaactaatggagaagagccgccagtctcgtatcgaagagtatatttcaagtaaggaaagcgatttgcagacttctacgaatcctccttaccttattaaataagtggagagttgaaaattgagagttgagagtttttaaaagacgagcactgtggcagttaataaaaaaaatataatgacccgttacttcttcgtcatccttttgatggcgttgataggcgtggcaattgtcgtaaaggctggtatcaccatgtttgccgaacgacaatactggcaggacgtagccgatcgtttcgttaaagagaacgtaactgtgaaacccaaccgtggaaacattatttcttccgacggaaaacttatggcaagttctcttcccgaatacagaatatacatggactttatgtccggtgaaaaggatgaaaaacgcagaaaaaaggatcaggcacggcgtgattctattcttactgccaatatggattctatctgcatcggacttcataagatattccccgacaaaagcgcggcccaattcaaggcgcacctcaagaaagggcgtcaggcaaagagccgtaattacctaatttatccgaaacgtatttcttatatacaatataaagaggtaaagagattacccgttttctgtttgaaccgatacaaaggcggattcaaagagttggcttacaaccagcgcaaaaagcctttcggttcactggctgcccgcacgttgggagatgtatatgccgacacggcaaaaggagcaagaaatggtattgagcttgcctttgatacaatactgaaaggacgggatggattgacgcaccgacagaaggtaatgaacaaatacctgaatatcgtggacgtgccgccggttgacggctgcgacctgataagtacgattgacgtaggtatgcaggatatttgcgagaaggcattggtggacaagttgaaagagttgaatgcttttgtcggagtagttgtcttaatggaggttgctaccggagaagtgaaagcaatcgttaatatgacaaaaggcaaggacggtaattattatgaaatgcgtaataatgcgatcagcgatatgcttgaaccgggttcaactttcaaaacagcctctatcatggtagctcttgaagacgggaaaatcacacctgattatgtggtagataccggcaacgggcagatgccgatgcacggtcgtgtaatgaaagactggaattggcgccggggaggatatggcaagcttacagtgaccgaaatcctggaggtttcttctaatgttggcacatcttacatcatcgatcatttctacggtagcaatccgcaaaaatatatagatggactgaggcgaatgagtattgaccaacctctccatttacagatcgcgggagaaggtaaaccaaacatacgcgggccgaaagaaagaagttatttctcaaaaacagctcttccttggatgagtatcggctacgagacacaggttccgcccctcaatatcctcacattctataatgcaatagcaaacaatggagtaagtatacgtccgaaatttgtgaaagcagccgtaaaagacggagagatagtaaaagaatacccaacagaggttattaacccaaagatttgttcggacaagactttggcacagatacgcgaaatcctgcaaaaagtggtaggagaaggactcgccaaacccgcaggaagcaagcaattccatgtatccggaaagactggtacggcacaaatatcacagggagcagccggatataaagcaggagttacaaattaccttgtcagtttctgcggatattttccttcggaagctcccaaatacagcatgattgtctctattcagaagcccggtcctaccgcttcgggcggtttaatggccggtagcgtattcagcaagattgcagaaagagtctatgcaaaagacctccgattaccgcttaccagcgcgattgacacaaacaccgttgtcatcccgcacgtgaaggctggagagatgagacaaacgcaacgggtcttggaagaactgaatatcaatatacaaggcaagattgccgattccgggaaagaagtttggggaagtacacacgctgctccgcaagctgttgttttggaaagtcggggaatcatgcagaattttgtgccgagcgtaatcggtatgggagcgaaagatgcagtttatctgttggaaagcaaaggattgaaagtcaatctggtcggagtggggaaagtgaaaagccagtcgatagccaacggaacgattataaggaagggacagacaattacccttaccatgaattaaaagtaaaaataagtattatataaaaagagtatgttactaaacaagttactgaaagcaatccaaccggtacaagtgaccggagagtcagacatagaaatcaccggaattaacattgattcccgtttagtagaagccggacaactgttcatggctatgcgcggtacgcaagctgacggtcatgcttatatacctaccgctattgagaaaggagctgttgctgttctttgcgaagatatgccggaggaaccggtagcgggaatcacttatatacaggtgaaagacagcgaagacgccacaggaaagattgccacaactttctatggcgacccgacttccaaaatggaactggtcggcgtcacgggaacaaatggaaaaacgacaattgccaccttattatataatacattccgctacttcggatataaagtgggactgatttctaccgtttgcaattatatcgacgatgaagcaattccaacagaacataccacccccgaccctatcacactgaaccggttattgggaaaaatggcggatgaaggatgcaagtatgcctttatggaggtcagttcgcactctatcgcacaaaagcgtatcagcggattgaagttcgcaggaggtatctttaccaatctgacccgcgatcacctcgactatcacaaaacggtggagaactatctgaaagccaagaagaagttctttgatgatatgccgaagaatgcattcagtctgaccaatcttgacgataagaacggactggtaatgacacaaaatacacgttccaaggtttacacttattcattaagaagcctcagcaacttcaaaggacgggtactggaatctcatttcgaaggaatgttgctcgatttcaacaatcacgagctggctgttcaatttatcggcaagttcaatgcatccaatctgttggctgtattcggagctgccgtattgcttggcaagaaagaggaagacgtactcgttgcccttagcacacttcatccggtagccggacgcttcgatgctgtccgttcaccgaaaggagtgacagcaatcgtagactatgcacatacaccggatgcgcttatcaatgtattgaatgcgatacacggagtgctcgaaggcaaaggaaaagtaatcactgtggtaggtgccggtggcaaccgcgacaagggtaaacgtcctatcatggcaaaagaagcagccaaagccagtgaccgtgtgattatcacctcggataatccccgttttgaagagccgcaggacatcatcaacgatatgctggcaggactggacgcggaagatatgagaaagacattaagcattgccgaccgtaaggaagcgattcgtactgcttgtatgttggcagaaaagggagatgtaattcttgttgccggaaaagggcacgaaaattatcaggagataaaaggagtgaaacatcattttgatgataaggagattttaaaggagatttttaaataatgagaacaatgtgctcatacgccaatatgcggttcggcttcgcaaaccgtccgtaaggaaaccggcatatcgacacattaataaattgacaatttatttatcatgttatactatctgtttgaatggctgcataagctcaattttcccggggcgggaatgttcggttacacctcattccgtgccttaatggcggtcctcatcgcattgcttatttcaagtatatggggtgacaaattcatcaaccttctgaagaagaagcaaatcacggagacacaacgtgatgcgaagattgacccgttcggtgtcaacaaggtaggtgtgccgagtatgggaggagtgattattatcgtagctattctcattccttgcctgttgctgggtaagttgcacaatatatatatgatattaatgttgattacaactgtatggttgggatcactcggatttgccgacgactacatcaagatcttccgcaagaacaaggaaggtttgcatggtaagtttaaaattatcgggcaagtaggtttgggattaattgtcggacttaccttgtatttaagtccggatgtggtaatccgtgaaaatatcgaagtacatactccgggacaggagatggaagtgatacacggaacgaatgacttgaaatcgactcaaacaacgattcctttcttcaagagcaataacctcgactatgccgatctagtctctttcatgggtgaacacgcgcagacagccgggtggatattgttcgttatcatcacaatcttcgtggtgaccgccgtatcaaacggtgccaacctgaatgacggaatggatggaatggccgcaggtaattccgccataatcggcgccaccctcggtatcctggcatacgtatcgtcgcacatcgagtttgcaagttatctgaacattatgtatattccggggtcggaagaactcgtaatttatatctgcgccttcatcggtgcattgatcggcttcctgtggtataacgcttatccggcacaagtatttatgggagatacgggtagcctcactatcggtggtatcattgccgttttcgctatcatcatccacaaagaattactcataccgattctttgcggtgtattcctggtagagaatttatcggctatcctgcaacgggtttactacaagctgggaaaacggaaaggagtgaagcagcggttgttcaaacgggcaccgatccacgaccatttccgtacttccatgagcctgatagaaccgggatgtacagtgaaatttaccaagcccgaccaattgtttcacgaatcaaagattaccgtccgtttctggattgtaacgattgtgctggcagcaataacaataataacgcttaagataagataacctccggcccttgtcggttgtcggaagcgggtttccgttcggaaatccaacgatatatagagagtattaacccgattattaacttttaaaagatgtgcccaacgaataagcaactcagcatattggaaacaagagcacattattgtaaatgaaaagaattgtaatattaggagctggcgaaagcggcgcaggtgcagccgtgcttgccaaagttaaaggatttgagacatttgtttcggacatgtccgctatcaaggacaagtataaggaacttctggacagccacgctattgcctgggaagaaggacaccacaccgaagaactcattctgaatgccgatgaggttgtcaaaagccccggtatcccgaatgacgctccactcatcctgaaactgaaagctcaaggaacgccggttatctcagaaattgagtttgccggacgctatactgatgccaaaatgatttgtatcaccggttctaacggaaaaacaaccaccacttccttgatttaccatattttcaagagtgcaggtctgaatgtaggtttggcaggcaacattggcaagagccttgctttgcaggtagccgaagatcatcatgactattatatcatcgaattgagttctttccagttggacaatatgtataacttccgtgcgaatatcgccgtattgatgaatatcacaccggatcatctggaccgctacgaccactgtatgcagaattacattgatgccaaattccgcattacacaaaaccagacaccggacgatgccttcatcttctggaatgacgaccctatcatcagacacgagcttgccaagcacggtctgaaagctcatttgtatccttttgctgccgtcaaagaggacggagctattgcctatgtagaagaccatgaggtaaaaatcaccgaaccgattgcctttaacatggaacaggaagaactggcattgacaggacagcataatttatataactcattagctgccggtatctcggcaaacctggccggcattgccaaagagaacatccgtaaggctctctccgacttcaggggagtggaacatcggttggaaaaagtggcgcgtgtccgcggcattgattttatcaatgactcaaaagcgacgaatgtcaactcctgctggtatgccctgcaaagcatgactaccaaaacggtattgattctcggcggcaaagacaaaggcaacgactatactgagatcgaggatttggtacgtgaaaagtgctctgccctggtatacctgggactccacaacgagaaactccatgacttcttcgaccgcttcggtttgcccgtagctgatgtacaaaccggaatgaaggatgccgtagaagcagcctacaaactggcaaagaaaggtgaaaccgtattattaagcccttgctgcgcttctttcgacctcttcaacagttatgaagaccgtggcgaccagttcaagaaatacgtaagggagttgtaatacgaagaaagccgtaatgttgtaatcaataattcgtaatagacaaagtggatttattaaagaacatattcaaaggcgacaaggtaatctggattatcttcctctgtctctgcctcatctcaatcattgaggtgttttcggcagcttcgacactgacctacaaaagtggtgaccactggggaccgattacacagcattccatcatcctaatggtaggtgccgtagtagtggtgtttctgcacaatgtcccctacaaatggtttcaggtatttccggtatttctatatccggtttcccttgttctattggcattcgtcacgttaatgggtatcattacgggcgaccgtgtcaacggagcagcccgctggatgactttcatgggattacagttccaaccgtcggaactagccaaaatggctgtcatcattgcagtttcgtttatcctgtcgaagaaacaggatgaatatggcgccaatcccaaagcctttaaatacatcatgattcttaccggactggtcttcatacttattgcaccggaaaacctgtcgacggctatgctgttattcggtgtagtgtgcatgatgatgttcatcggacgggtatctgcaaaaaaactgttcggaatgctgggattgctggcacttgtaggtggggtcgccgtaggaatactaatggctatccctgccaagacactgcacaacactccgggactccaccgtttcgaaacctggcagaaccgtgtttccggcttcttcgataaggaagaggttcccgccgccaagttcgatattgataaagacgcacagattgcacatgcacgtattgccattgccaccagccacgtagtaggcaaaggtccgggaaactccatacaacgcgacttcctcagccaggctttttctgactttatcttcgctattgtagtcgaagaaatgggactgataggaggcatattcgtggtcttcctttatctatggctattgatgcgcgccggacgaatcgcacagaaatgcgaacggactttccccgccttcctcgtcatgggtattgccttactgctagtatcacaggccatattgaacatgatggttgccgtcggactattccccgtcacgggacagccgttgcctctggtcagcaagggaggaacaagtacgttgattaactgcgcttatatcggaatgatattaagcgtgagccgatataccgctcatctggaagaacagaaagagcatgatgcacaacttcaactgcaaattgaaacaaatgccgcagattccgaagcacaggcggctgccgaaccgacagcacagattctgaacagcgacgccaagtttgaagatgaaaatgatatcaataaagggtgaacaagatctgtaaacgatgaatggtgaatgatgaacggtaaacggagaacaacggatagaagaaaggattattatggaaaaagaacttagaatcatcattagcggtggaggtacaggaggacatatcttcccagctgtttccattgcgaacgctataacggaactgcgtcctgacgcaaagatactctttgtaggagccgaagggcgtatggagatgcagcgggttcccgatgcaggctacgaaatcatcggtctgccgatagcgggatttgaccgcaaacgcttatggaagaatgtagctgtactcgtgaagttggcacgcagccaatggaaagcacgaagcattatcaaaaacttccgcccgcaagtggcagtcggtgtaggcggatacgccagtggtcctacattaaagacagccggcatgatgggagttcctactttaatccaagaacagaactcgtatgcaggagttaccaataaattgcttgcacagaaagcgagaaagatttgcgttgcttatgacggaatggagaagttcttccctgccgacaagattatcatgacgggaaatccggtccgccagaatctgacgaaggacataccttctaaagaggatgcactacactctttccacttacagccggataaaaagacaatcctgattgtaggcggcagcttaggagcaggtactatcaacaaaacgctgaccaccggactgtctgctatcaaagagaacagtgatgtccagtttatctggcaaaccgggaaatactattatccgcaagtaacggaagccgtaaaagcggcgggagaaaacccgaatttatatgtgacggatttcatcaaggatatggcagcagcgtatgcagcggccgatcttgtaatctcccgtgccggagccggttctatttccgaattctgccttttgcacaagccggttatcctggtaccttcgcccaacgtagcagaagaccaccagaccaaaaacgcactggcattggtaaacaagcaagcggccatttatgtaaaagacagtgaagcggaaaccaatttattggatgtagccctgtctacagtcaaagatgaacagaaactgaaagaactaagtgaaaatattgccagattagctttacccgattctgcaaaaatcattgcacaggaggttatcaaactggcggaaaaagaataataaaaaaagcaatgaatatagaaacgataaaatcagtctatttcgtaggtgccggcggcatcggaatgagtgcacttgtacgttacttccttttcaaaggcaaagtagtggcaggctacgaccgtacccctactccactgactgaaaccctgatcgccgaaggcgcacaaatacattacgaagaaaacatcgacctgattccggaagcctgtaaggacaaggaaagtacgctcgtcgtattcactcccgccgttccgcaggaacacgaagaactggtttatttccgtaacaacggattcgaaatacagaaacgcgcccaagtgctgggaacaattactcattcgagcaaaggcttatgcgtagcaggaactcatggcaagaccaccacgtcgaccatgactgcccacctgctccaccagtcgcacgtggaatgtaccgccttcctcggaggaatctcaaagaactacggcactaacttgctgctttctcaaaaaagcccttacacggtcattgaagcagacgagttcgaccgttctttccattggttatccccttatatgtccgttatcacggccacagatcccgaccatttggatatttacggtacagaacaggcctatctggaaagtttcgagcattacacaactctcattcaaccgggcggcgcattgattatccgtaaaggcatctccctgcaaccgaaagtacaacccggcgtccgtgtctacaactattcacgtgacgaaggagacttccatgccgaaaacatccgcatcggaaacggagaaatattcatcgacttcgtagccccggatacccggatcaacgacatccagttaggaatcccggtaagtatcaacattgagaacggagtagctgccatggcattggcacacctgaacggagtgaccgatgaagaaatcaaaaaaggcatggccagcttccgcggagtagaccgccggttcgacttcaagataaagaacgaccgggtagtcttcctgagcgactatgcacatcatccctctgaaatcaaacagagcgtgttgtccatgcgcgaactctataaggacaagaagatcacagctatcttccagccacatctatatacccgcacacgcgacttttatcaagactttgccgacagcctctcgctgctcgacgaagtaattctggtagatatctatccggcacgcgaagcaccgattccgggcatcaccagcaaactgatttatgataacctccgcccgggtatcgaaaaaagtatgtgtaaaaaagaagatatactgaacattctgaaagataaaaacattgaagtattaattactctgggagcaggagacatcgacaactatgtccccgaaatatgtaaaatcctcgaaaaccgataaagcttatggtaaagagaatccttctatccattgtcatgctggcgctcatagcctaccttatcgtagctatcaccgccttcaaccgcaagcctgccgaccagacctgccgtgacatggaacttgtcatcaaggataccgcttacgccggcttcatcactaaagacgagctgaaagggatccttcagcaaaaagggatctaccctatcggaaagaaaatggaacgtatctctaccaaatcattggaacgggaactgagcaagcacccgctcatcgaccaggcagagtgttacaaaactcccagcggcaaagtttgcgtagaagtaacccaacgcatccctatcctccgggtgatgagttccaacggcgagaattactatctcgacaacaaaggaactgtgatgccgccggaggcaaaatgcgtcgcccaccgggtaattgtcaccggaaacgtagaaaagtcgtttgcaatgaaggatttatataagtttggtgtatttttgcataacaataagttctgggatgctctgatagaacaaatccacgtgttgcccgaccgcaacatcgaactggttccccgtgtgggagaccacctcgtctatctcggcaaactggacaactttgaagacaagctggcacgtctgaaagagttttataagaaaggactcaatcaggtaggctggaataaatattcacgcatcaacctcgagttcagcaaccagataatttgtacgaaacgagaaaataaaaaataaagagatatggcaacaacagaatttatcgccgctattgaacttggttcatcgaagataaccggtgtggccggaaaaaagaacagtgacggaagtatgcaggtattagcgtatgcccaggaagactcttctacgtttatccgtaaaggggtgatcttcaacctggacaagacggcgcaaagcctgacttctatcattaaccgactggaaggtgagttgaagaactcaattgccaaagtatatgtaggcatcggcggacagtcactccgcacagtccgtaatgtagtaagtcgcgatctggaagaagaagctatcatatcggaagaactcgtaagcgctatcggcgacgagaacattgccgttccggtggtcgacatggatatattggacgtagccccgcaggaatacaaggtcggcaacaacctgcaagccaatccggtgggcctggtaggtagccacatcgagggacgcttcctcaatatcgtagcccgcacctctgtccgaaagaatctggagcactgcttccaacaggcgaaaatcgacattgccgaccaattgatcgctccgttggtaactgccaatgccgtactgaccgaaagcgaacgtcgttcaggttgtgcgctcgttgacttcggagcagatacaaccactatctctgtatataaaaacaatatactccgcttcctgacagtactaccgttgggaggaaacagtatcacccgtgacatcacttccctgcaaatggaggaagaagaagcggaacgtctgaaaaaagcatacggagacgccttctacgaggaggaggaagatcaggaagaagctacctgcaaactggatgacgacagccgcacgatcaaagtaagcgacctcaacaatatcgtcgaagcccgtacagaagaaatcattgccaatgtttggaatcaggttcagctatccggctacgaagacaagctgctggcaggaatcatcatgacaggaggagccgccaacctgaagaatctggacgaaatgttgcgcaaacgcagcaagatagaaaagatcagaatggcgaaacttccacgtaatacagtccatgctccaagcaacgtactgaaaaaggatggttcgcagaacacactgttcggcctcctgttcgaaggaaaccagaactgttgtctgacggaaactgctgctccgcagtctcccgtaactccgaaaccggaaccggaagtacacaaaactgtcgatatgtttgaggacgaccaggaactgaaagaacaagcccgcatcgcccggctcaagaaagaggaagaagaaagagaggccaagatagcagctaaggaagcagaaaaacttcgcaagcagaaggaaaaagaagagaaagaaagaaggaaaagagaagccggtccgagctggattcagcgcaagatcgactcgttgacgaaagagatattctctgacgacgacatgaaataactctccgaaacgaagcttgtaatttataattagtaatcagcaataacctataagaattatggacgagatagtacaattcgatttcccgacagactcaccgaagatcattaaagtaattggtgtaggtggtggtggtggtaacgccgtaaaccacatgtaccgggaaggcatacatgacgtgacgttcgttctttgcaatacggacaatcaggcactggcggaatcacccgttccggtgaaactgcaactgggccgtagcatcacccaagggcttggagccggcaaccgtcccgaacgggcacgcgacgctgccgaagaaagtatagaagacatccgcaaccaattgaacgacggcaccaaaatggtatttatcaccgccggaatgggaggaggaaccggaaccggagccgcccccgtcattgcccgcatcgcgaaggaaatggatattctaacggtcggtattgtcaccattccattcatcttcgaaggagaaaagaaaatcattcaggcactggacggcgtagaacgcattgcccaacatgttgatgccttactggttatcaacaatgaacgcctgcgcgaaatatatgccgaccttacttttatgaatgctttcggcaaagctgatgacacactttccattgctgccaagagtatcgccgagattattacgatgcgtggtacagtcaacttggactttgccgatgtgaagactattttgaaagatggtggtgtggcaattatgagtaccggattcggcgaaggtgagaatcgtgtcaccaaagctatcgacgacgccctgcactctccgctgctcaacaataacgatattttcaatgccaagaaggtaatgctgaacgtttctttctgcccgtcgtccgagttgatgatggaggagatgaacgaaatacacgagttcatgagcaaattccgcgaaggtgtggaagtcatctggggggttgctattgacaattcattggaaacgaaggttaagattaccgtacttgccaccggattcggcgtagaagacgttcccggcatggatagcttgcacgctgcacgcagccaggaagaggaagaacgccaattacaacttgaagaggaaaaggagaaaaacaaagaacgtatccgcaaagcatacggagaaagcgccagcggcatcggtagcaagagcttacgcaaacgccgccacatctacctctttaatacagaggacttggataacgatgatatcatcgccatggtagaagattctcctacttatcagcgcgacaagacgactctaaccaaaatcaggacaaaagccgcccttgaagaggaagtagctacggaagaagctatggacgacaacggagttatcactttctaaattaacttataacataaagatatggatttatttgatcaggtcagcgaagacattaaaaacgcaatgaaggcgaaagacaaagtagccctcgaaactttgagaaatataaagaagttctttttggaagcaaaaaccgctccgggtgccaacgatacattgacggacgatgcagctctgaaaatcatccagaaactagtgaaacaaggaaaagactctgccgaaatttatataggacaaggacgtcaagaccttgcagatacagaattggcacaagtcgctgtaatggaaaagttccttccgaaacaaatgaccgctgaagagctggaagctgcactgaaggaaattattgccgagacaggtgctaccagtggaaaagacatgggcaaagttatgggagttgcctccaaaaaattggcaggacttgcggaaggacgtgctatttctgccaaagtaaaagagcttttgggataaattcccactctttacaagagattttattggttcttcgtcaaatttggtggtaatttaaccagtcggtggtgtctccattcccctccttcgggaaggagaatgttgaatactatcgattatcaaattattattttcctaattaattttaccaccaaatttgaagcagaactattttatttcagttttatcttgcaccttacactaatcatgggttatctatttgattaatagcagcataatccagtgcaagataccgttgcagatgtgtgcaagatgtttttaccttacacacatctgcaactttttttttatagtgggaaaactactcccacacttacctttccaataaagacatacggataaagcattagttcagagcgttgaaacactttgtttcagcagcttgaaacaaaatgtttagtgccttgaaacaatatatttctcggtgtgaaacaaagtgtttctctacgggaaacaaatcttagcatggctgattaaacagccccaaccgacattcgccgtttcaaaacccgacagtagcaattatgatccctcaaattaaaacaatcaccaatataaggaatccattccttttagttatggagataatgataaaaataatcgaacaaacttattttcctcattatcaatccggaacaaaatttcagaaaaaatgtatggtatccgaagatatttcataggtgttaacaacaaaaaagataactacttttgttatagtctctgactaatatgtaaaataaacaagcttatgaaacaaaaaggtaataaaaaagggtttaccggatgtgcccaagcctatatccggaagttacaagaagaaggccgcttttcgacagcgcacgtatataaaaacgcggttctttcattcaccaaattttgcactactcccaacattgcattcggacagatcacccgcgataatctgagacgatacggacagtatctctatgaacacggtctaaagccgaacaccgtatcgacatatatgcgtatgttacgcagtatatataatcgtggcgtagaagcaggtattgcccgcttcattccccggctgttccgggatgtgtacacaggtgtagatgtacgccaaaagaaagcactacctgccggcgaattgcatacgcttctctataagcctcctcactccgagcacctgaagcagacacaagccatcgcacggctgatgtttcaattttgcggcatgccattcgcagacttcgcacatttagagaaatcggcattagaacatgggatcctcaggtacaaccgcataaaaacgggtacgcccatgagcctcgaaattctggatgtatcaaagcaagaaatgaataagttacgcaataacaactcaccgaaagaaaattatccggactatctatttaatataatgaaaggtgacaaacaacggaaagatgaagctatttataaggaataccagtctgcactccgccggtttaataatcaactgaaaagcctgtcaagagaattacgcctaaaatcaaccgtcacttcatatactctacgacattcctgggcaacaaacgcaaaatatcaaggaatctccattgagatgattagcgaatcactaggacacaaatccataaggaccacgcagacttatttgaaggggttcggattaaaagaaaggacagaggccaacaaattgaattgttcttacatcgaatcttataaagcaagtaattattaactcataacactctagatacaaacactttaccttatctgttacttcttaggtaacggatataaatatggcacaaagatatataaaaagaatctcacaatccaaatgaatcatactttattttagttttttctttgaaaaaataaaataacaggcaagaacatgaagcattcttcttttcatgttccaactttctattgctgaccaccgaacaattttccatccgaaagcagctaagtatattttatttataaaagaccgctgtctttatcctatttttactttgcacgttcatgtcctaatatcagaattccgttacctaagaagtaacagatacacataaacaaaaaattatgacacacaagcctaaaatcaataaatatctgtggctatctgccggcaaaagttggagatttacgacaagcacaagacataagctggtcgtcctttttgtctttgctttatgcatcctgcccgcaaacctctgcggacaaagtttggccatcaaaagcaatctgctttatgaccttactacctcactcaatttaggaggagaaatccgttgtgacgatacacacactttcagcctttctgtcaattacaacccatggaatttcagtggaaacaaaaagatgaagcatttcctcgtgcaaccggaataccgcaaatggctgaacgaggcatttacaggaagttttatcggcttacaagttcactacgccttatacaattttgggggaatgctcccttggggattcggaaatgggaaaatgctgggcatagaaaaccgacaaattgccaacaaccgttatcaaggcaatctggcaggattcgggatttcctacggctatcaatggatgattagcccgcaatggaatatggaagcaggaatatcgctgggatatgcccatctcaactataaacgatacggacaacccgcaggtgcccccctgatagaaaaatcaaactgtaactattgggggcttacacaaatagggatatcagtcgtgtatttcatccaataattcaacctaataaacgcataaaatgaaaacgaaaacattcatcctgctcagcttattgatatgcaatctgcttccggcccaaaacgtcaagctggatatcaaaccccacttcctcggagtacgggcagactcattattcgtatcaatggacatatcagtagaaatagaggacatgaacccgaaaaacgccgtcatactgacccccattctaaccgggcaagaccggaaaatattattaccggccatacaactgaacggtaaacagaaacaaaaattatatgtacgcaaccagatactacgtaaaaagaaaaacagtaaggaaagcaatacagcataccttgtgacaggcattgatgatgaacattcgcgtaccatagcctatcaaacctcactaccggcagagcagtggatgaatgatgccgcgctctatctgagaagaacgattgtcagaccggaaagcgaacagactctaaaagatacattaattctcgcaccacaatatgcagtgcttccacccaatgtaacggcaaccgatataccggctcaggaaatatctgccacaacgatgtccaccaatagtatgccctccatttcgcctactccggttaataaaaaactgaagtataaaggttcatatatttctccggcttcggacgacgtagatatccgcaatcaaaaagaactgaacttcaatcttgaagaggccaaaattatggctgatatcaatccgcagatgttatcgctccgtgaattatatacggtagcattgtcatacgcggacaataaaacgaaattctatcagattatcaatatcagtgtcaagctgtatcccgtacatcccgttgccaaccttaatgccgctgccgccgccattgaacagggagatacgaaatcggcaagcaaattcctttcaatggcactacacgagggactggcctataaaagttgccggggagtatatgaattgatgaccggaaacacgtatgaaggtatccgtatattgaaagcagccaaagctgaaggttctgaagaagccgcatataatctgaatgttttttttgagaacaataaacgtccttaaccggcagacacaatgagatatttcataaccctactcatattatttggttgtcttgacggctattcacagaaagtagccgtcaggctcaatgcgcttccggcaacagacggagccttcggagccggagtctcttatgggatagggaataaaagcactgtcgagttggccggaagcttacggccatggaagcgaagcgaaatgtacgtgaaccgttactggttgatacaacctgaatataaatactggacttgtcaaaagttcaacggatttttctggggagggtatctcaatggagcgcaattcaacgtcggagggaaaaaactacctttcggcatattcgctgacctcaagaaatatcggtacgagggctggctcatcgggggtggcatcagttgcggataccactggatgctaaatgaccactggaacgtagaaacgagtctcggagtaggatatgatttcatccgttacaagcagtataattgcgtcaggaaatgtgcaggactacgcaataaaggacagtatcattatatagggcccagcaaagcctctgtaagcttagtttatctattttaaagagaagaacagtatgagaagtatatggaaagtttggttttcaaaacgaagaaagatttattttcggatagcacgcaaattccatactaccccatggaaagtctatcggttgggacatggtggaatgagcaagaataagaaagatataaaaatattggaagagttacaacgatatggagtaatctcctatatctacccttggtgatattatcacataaaaatgaaaaaatatagtttactacaagtatgaaaacaggaggtttttttattattacgattattctatccctttcgatacaggctcaaacggttgtaacgaaagagacaggaactattcgtacaacttcctccagtttgtataaggcggggaaagaactggtggtttctatttcaatagatatcacacgggatctctcgtccaatgaatcaatggtactggttcctattgtctgcgatactctggaacatcggttggaactgcctccgatttatatcaacagccggaaacaacatattgttttcctacgggagacaagtaaaaaagaaaagtctgctcaagcattacaaaggaaaaacgggaataagcagacgatgcattatttgcaatccgttccattcgagcaatggatgaatcaggctaccctctcgctaatagagaagagttgcggctgtggcattcccgacgcggaagatttcatctgcattgcccgtttacatccacggcctacattcgttccgcaacttgccttcctgaccccgcaagttgaaacatcaaagatcagaacggaaaaaggttccgcattcattgattttccggtcaatgtaactgctattcataaagaattcagcaataacgtaatagaactgaataagatcattgaaacaatcaacactgtaaaaaacgacagcaatgtaagcatcacacgcatcagcattcatggatatgcatcacctgacggtccgcttcaactaaacgagcgactggctcgcgaacgtacccggaccttgaaggaatatgtatcccaactatatccattcgacggcaaatacatacatacgacctacacacctgaagactgggagggttttgaggcacttcttagcgacacaacttttcaagacaaagaagctatcatgaaaattgtgacaagcaatatgcatcccgaccgtaaagaagaaataataagaatgaggtttccggcattctaccgttttgtattgaaacactggtttgtcatactgagacattccgactataccgtcgagtaccacgtacgtccgtttacaatagaagaatcacaaaaagtattcgatacaaatcctaaaaatctcagtttggaagagatgtttcgtctcgcactcacatatacaccgggaagtgcaacttacaacaagatttttatgactgccgtacaattgtttccggacaatcctacggccaatctgaatgctgcctgtatagcattgatacaaaaagacacaaagaccgcagccgtctttctcgaaaaagctccgccattaccggaaacgacgctggccaaaggtgtcttatgtttcctgcaaggcaactataaagaagcagaggcactattccggcagtcgaaagacgcaggactgttacaagccgacgataacttaaaacagattttagaagtaaaataattattcaattaaactcaaaacaaaatgaaaagattcacacaactaatgtcactgttgtttatggcagcagtcacacagtacagttgcatcaatgatgcagatgtagctttttccgatgagagccacacagattcaaacggcaatcttgccctattctttgaaatccccaatgagaaccacactcgcagcgccgaatcatcaggcgtgacagagactggctcaaaggatgaatatgcagtaaaaagtctgacagtctatctgttcgattcgaccactaaaagtctgaaagaccaacaagaactgaagaacatcagacaggtcaaaggagaaggggaaaatatacagtataccgctgacagaattaccgtaaatccgggtacatacaatatctttgccattgccaacgggaaagcaatcaccaaagaaatcaccatgcaagacgatttcttaaatgctgtcgatgaagtaacgtacagtacaggaaagattccaaatgtacccacagagggttttgttatgacaaaccgtggtgcagccaacctgaacatagagataagcaagcctactgactcggacaagataaccaatgtatctatcggtcttgagcgtgccgttgccaaaatcgaactgacccaaaaacaagagacttttcccctgaaagatcccaacggagaggtgtattgtaccataaaactcaacacattcagaatgttgaacctggcaactaaattctacacattccgccacacagccacattgaatagctttcaggagccggcttcgtatacggaagaaaactttggtgacattcccgatgtcaacggttatctaatcgatccttatttcttcaagaaaacagtggaaggtgccaaagatttcacaaatgccgacggtttcttcgcacaagcattagtagatactgacatcaacgacaataactgggcaggtatggcaccagccaatagctggtcatacatttactgtctggagaactgtatgttcgttgatgcacaattgaatgcatacagtaccggagtaatgttcaaagccaacatggacatcgccactaaccgcgttttcgacgaaaatggtaccaatataaacaatccgtccaactggcctaccaagatgttctatttcaattataacttctacatcagtgtagatgcaatacgtaaacaggttctgaataacttaccgtcagatgtcacagacgattcggacacagagactcttgccaaatacagtatcaaacgtttccagaaaacagaaaactactcatgttactacaactactggatcaagcacgaggataattatgaatctacagaaatgggtgtaatggaattcggtattgtccgtaataatatatatcgtctgtctgtcagcaaagtggcaggactcggtagtggagatccttacattgagccggaacaaccggacgaatataaggccgaactggacatcaatatcaatgtttttccatgggccgtacgtaatcaagatgtagaacttgaataagtagtaccggccaactgaattaaaatcatcataaatgcgttcatttctactacatattatctgcattgtcgcgttgttctcgtcctgtgattgggtgaatgacgatttatcagactgtcctacaggaacttggttaaagatatcatatacctataacatcctgaacgtggacgctgcatctacgcaggtaggcgacattaccattcttgccttcgacaagaatgacaagtatgtggatcgattggacgtagacagtataacattacatcaaggctactgcatggtaagactaccgtttcccgaagaaacttatcacctgcttatatggggagggatatccggctaccagtatcagctcccgaatctcaaggctggacaaactgaacggaaatctctgaatatatcgctggcatgtgacaataagaatcagtttaacaggaaactgaatgcactctttcacagtagccttgaaaatattactatcagtgaagaatatcaggtcatcactgccggactggtgaaaaatacgaattacttctcgtgtatcctacaggatgagaacaatcttcctctacgacaagaggacttcgctttcaccctagaatccaccaacggtgtaatagactatacaaatactcctgtcggcacaactccgacctgttatcttccatatcgacaggaactgtctctgacttccgaacaaatccccatcattcacgccagattaaatacactgcgcatcatgaagggagacgacacaacattatcaataaaacatacaccaagcgggaaaactattctgcacctaccactcacccaatatttattgttatcaaaaaattatcctaataacataggtgacataagtgatcaagaatatcttgaccgagaagattcttacacactcatgttctttatacaatcatcggacacggggattccgaggattccaacaatgaaagtaaacgactggattatacgtctgaatgattctgaactaggatcatagaaaattaagaaataagtatttatacaacataatataggtgagatgtaaaaaaggctactgtgaagtacccaagcgggcttttgccctcatagcatataaatattcccactcaaataaaacggcataatctttgagaaaccgttttattcattgtttgttttgtttgtattaagtgcatccattccaagagaggaacggatgcactgtttgttttatagatgactagaatatcaaagccttatcaacttctgaaataatagaattaaagaagctatatgaaaacaatacagcctttcatcttttgtcatggaaccgatatccaagccccagcatcagattgttgggatctttaaacttgctcaactggtatccaacgtgcaggaacaagtggcgtgtgacataagttttgagagctagaatctggtagaatccctgcgtatcatctccatggcataccagattccgtcctagcccggcattgattgagaaaatgggcattaccagttctgcacggagggacaaccccactgcaaattgctcgcgaaaaggaggacgatgaaactttaaatcgcccgaataacttccttccaatttataatctttgatattggcactctcgtcatactgcgcatccacagaaaggcccgcccgaaaatagttgttgaagttatacattggagcaaagttgagacctgcaataccaaacgaaccgggaaccagactcggtatattgtcctttacgaatcccctcttacgagtggcaccgtatattaccagatcataactgacatgcggctttataaatacccgcttgggggatactgttccgagtgtctcatccgcatctccaaaggtgcgtacaatgccgactctcccaccgatcacattgagtccaccattaggataatgcgtgtttccgttagaaaaatgtgtgaagtccacacctgcggccaatttccattgcggatgaagctgccagttcaagataaaccccagattgatgtatgcattgattttagaaccgataacctcattctgcggattatatagcccgtcatatttcttccaaccgaaagaagcaccgaaattccactcgtaatcaaatgacaagagaggcgaaagttgtacaataggtgccccctgaaaagcatataccgccaccggatttccaagttcagcgggagagtggaaggtattataagatacacctatcccctgataggcatgggggtacagccggcctaatcgggaatctttattgaaccggaaagcatacttcagatgtagggaaagtgactggtcaatggtcttctgccgtgcattatctccttccagaaagctgtttgtcggagctacataccccggacgaatatcaaaaccaatctgatgcttcacaattgtctgagccttcagattcccgccaactacagaaatcgtcaacagacaaataatgtatagtaaccgtccggtattcatatctttagtcatttgatattttctcgtgttatgtaatatgcagcaggcattttattttgcaacgtgccgtttatggtccgccgtttcccggtctttgggtgaacagcatagagggcgtatctagtttcaaaccagtaatactctatcagcacagtgatacgctgggtcgtataaggtggaatagagacctctatctgttccgtattggaaaaaggtaatgtttgctgcttggaagtatatcgcacctgtttaccgttcatctgcaaatgaccgttttctacgcttggtatctctactgtcaggttactttctcccaatagttgaaaaagttccggcatgtcgcttctgaacatcacttcatgataaacattctcgtaaggagacagtaaacacggatagtcaataccccagccattaggttgcacaaaactcctttttgcttcgattcttttctcataagaatcctcgtctaaagaataataagtgatatgatcaatcacatacctgtccgatggtgaaatatcaacgtatatctcctgagactcatattcgttgctcaccgtgagtttgaattgaaaatgagtagaacgggcattctcttctactgcaatcttcagttcccggggattactacgttcgatagtgaaaccgatcaattcctcattgcacacaatcttgccctgtcctttaagatatggaaattggtccgttgttatcagatcaccacccgcatcatacactgcatacgaataggtaaaaccttcatcatacgtatacactcccaatacgtcccaattggaagaagcaaaccgaatgattttggtgtcgccattgccatccaaagtcagttcggaatcggcagaccggaaatcgtcaacaaatacatcaccgttacaaccataaaacaccaatagaataagaatatattccgttaagtttatgaatatcttcatgttgtttagctctagtcattacattgaggacaaaagtaatatatatttttagaactcaatggctttaacccatgtaaaaatataactaaagttacatacaacaagcgaataacaaatctaatcaaacaattctttcaatacttccagtgatttcaaagccgggaaatccggcagatgcaagcgataatagtcattcataatggccaggcaacgagcacgttccgcacgactcatgccgaaaagatgcattgtttcataattcatgcgcatcaagtggcggagtcgccctgcctcctcaggattaatataggaagaatgcagttggggacgaatggaagtgaaacaggcattcagcaaatcaaaataatcgcctgtatggtagtcttccaaattagggtaaagccccaaaaagcgggaaagtctcatcaaaaacaccagatgaaaattagcaaaacctcccccacactcatccagccaaataattgaatgttgcaaataagcgaacaaaggacgattctctgcctcctcccgaactgcccgatagaggaactctgacaagaaaagtgccattgaagatttatacgggtcatagggaatagaagaaaagggataaaaagatttcgcctccttgatgcgataaagtgtcgcattcggacgataatcggcctcgaactcaatgaaagacaacggttggaacagaacagacttcactgccgcctttcgcgaacgaggtactgcgacaagaaacgaagcccttccggacaactccgtatacatatctacaatgatagaagtatcattatatttgagcgtatgaagaactattccttttgtcttttgcagcatatacttgcatatttcaatccggtagcaaaactacaaaaaaaatgcgaccaatgccctatttcatcctgaaacagtctttttaatcttccgtacttttaagaatccaaaacacataataaccagaagtaaaccaatgagcccccctcttatgagccagaaagtgaatgtagattctccttggcctacttcatctgtaaagccgaactcacttttacatccggcttcctgaagaatctgttgataaagcagtttcatatcgtaggccttatccgtagcaataaagaatttgccactctctatcttacaattcacataaggagctgtaagaatgacaccattgaataagaatccgatatgcttgcctattgacttttccgtcgcttcagcccaagtcgttttatgagagtcgtccaatactccgagaatacggtaagccatattgtcctcgttcgagtccgacactgaatccagttttatccttgcgaaatctttcactgtcacaatcgggtctgccgacaaactgtcatgctccatatcaatcacataataccagccgttaggacggacagaagtactctcaaatgaagaaaagccgcaccaaagaagcaacaaaaaagagataaataaaatagttctcataatatatttaatttagagtgattatcggaaatagttagtaaataggaacataagctattcaatcagttattttgtatcatatcttccagccttctcaattctttattcgcttcaaggagttgtcccactttccgatataaatgccggaatacaaagatatcaagaatgaccagcaacaacacaatacccacaataatacatccccgtacaagagtagcataaatgatgaaccaggcaaggaacggaacaaaagcaacataagtactgatgtatccccaataaagcgatgatttatactgcaaaacatgaagaatctggcgttccaaatcatatttcatgcaccctgcttgtttgagtttataatactgaaacagatttatcccgaagggtaccgagattgcaataaagaatactatatccgacatggccaggaaaaaggggtcaatcagaatgtaaactaaaacattcaaaaacaaaaaaaacagaatccccagagagatccgttcataccataataaccggttatagctggtcattctcttctttgcgagcatttcttcaacttgctgcctttcgacaacttcctgacaattgatcttatcattaaattgtccccatgccttttttagttcatcaaattccatattatattctatttatcggtccgacatctttttcagtttctctttaatacgatgaatacggatggccacattattgcgacccactcctactatttccgctatttcatcataacttttttcatccaaccaaagcataatatacatcttatctacattatctaattgatgtataagctgatacagatgtttcatgcattcgtcatgttcgcaatcatccagtatatctatgtcttgtttcaatggtacataatcataattcttctttttccgcaggtttgtgatgcaagtgttgagtgtaatccgatatatccatgtgctcacgctactatgacctttaaagttccgaaagctcttccacaaactaagaacgacatcctgatacaaatcattaatatcatcattgtccctcgcatacataaaacatatcttataaatgatacgtttgttctgcaatagcatatctataaattctttattgtcattcatcgttcttagcatttgtcccgttagtcgtcaaaataatcatttagttacaaagagaaacataaaaaactgtatttttatgactttgcagatttcttttttaaaccggattacattcttacaaagaaaaaacaagttcgcgatttaaatcggaaataaactttcctatatattaaggtatacaagtatatatacttcccggtatttttaagagagcgtacattttctcacaaaaaaatctgccatttattccactgattttcaatataaaacaaaacatcaagagaaaaaaacgactattttatcgaaaaaaaattaatgaatagtttgtcagtttcaaaaaagttcctacctttgcatccgcaatcgagaaacaaacactgattcgagaaagcaaaatgcagaaatgcaacaacaggatggcccgttcgtctatcggttaggacgcaagattttcattcttgaaaggggggttcgattcccccacgggctacaagtaaaaagaataaagaactaaaaaaatagattagtcgaaatggcaaatcataaatcatcactgaaaagaatcagacaagaagagactagaagacttcataacagatactatggtaagaccatgagaaatgctgttagaaagcttcgcgcaactacagacaaagctgaagcagttgcaatgtatccgggcattacaaagatgttggataagttggctaaagtgaacattattcacaaaaataaggctaacaatctgaaatctaagctcgctctttatatcaacaagctcgcttaatacataggaatttaataattctatatagcatcaggctgaacttttaagttcggcctttactgtgtatagacacttgactatcaagtctatcgtaaaagtacagaatccactttcattcttcatttttcacggtttattcttcgctaagtcgacaaatttcactatatttgctctgttattaaagttagaaaggcaattatgagcgaagaacaaatcactcccaataacgggtcttattctgcggatagtatccaagtattggaaggtcttgaagcagtgagaaaacgccctgcgatgtacatcggtgacatcagtataaagggacttcaccatttggtatacgaaatcgttgacaactctatcgacgaagctttggccggctattgcgaccatatcgaagtaacgatcaacgaagacaattcaatcacagtacaggacaacggacgcggtattccggtcgactatcatgaaaaagaaaagaagtcggcactggaagtagcaatgactgtcctacacgccggaggtaaattcgacaaaggttcctataaagtatccggaggtttgcacggtgtaggtatgtcttgtgtaaacgcgctgtctactcacatgactacgcaagtattccgcaacggtaagatctaccagcaggaatatgaaataggcaaaccgctatattcggtaaaggaagtcggcactgccgacattacgggaacccgccaacagttttggccggatgataccatttttacagaaacggtatatgattacaagatcttggcttcacgactacgcgagttggcttacttgaacgccggcctgcgtatcacgctgacagatcgccgggtagtgaatgaggacggtagcttcaaaagtgaacagttctattcggaagaaggactgagagaatttgtacgtttcatcgagtcttcacgcgaacacttgattaatgacgtgatttacctgaactccgaaaaacagggaatccccattgaagtagcaatcatgtacaatacagggttctcggaaaacgttcactcttacgttaataatatcaatacgattgaaggtggtacgcacctcgccggtttccgccgtgcactgacccgtacactgaaaaaatatgccgaagacagcaagatgttggaaaaggtaaaagtagaaatctcgggagacgacttccgcgaaggtctaactgctgttatttccgtaaaagtagctgaacctcagtttgagggacaaacgaaaacgaagttgggtaacaacgaagtcatgggtgccgtagaccaggccgtaggtgaagttttgtcatactacctggaagaacatccgaaggaagcaaaaacgattgtagacaaagtgatcctggctgctacagcacgccacgcagcaagaaaagcccgtgaaatggtacaacgtaaatctccgatgtccggtggtggtttgccgggtaagctggcagactgttcggataaagatccgtcaaaatgcgagttattcctcgtcgagggtgattcggcaggtggtaccgccaagcaaggacgtaaccgtatgttccaggcaatccttccgcttcgcggtaagattctgaatgttgagaaagcgatgtatcacaaagcgctggaaagtgacgaaatccgtaacatctataccgcattgggtgtcactatcggaaccgaggatgacagtaaagaggccaatattgaaaaactgcgttaccacaagattatcatcatgaccgatgccgatgtcgatggttctcacatcgacacactgattatgacgttcttcttccgctatatgccgcagatcattcaaaacggttatctgtacatcgctactcccccgctctatctctgcaaaaagggtaaagtagaagaatattgctggacagatgcacaacgccagaagtttattgatacttacggcggcggttcggaaaatgcaatccatacacaacgttacaaaggtttgggtgaaatgaatgcccaacagttgtgggaaacaactatggaccctgaaaaccgtatgctgaaacaagtgaatatcgataacgctgcagaagctgactacatcttctctatgttaatgggtgaagacgtaggaccacgccgagagtttattgaagaaaacgcaacgtatgcgaatatcgatacataatattaattttacgtttttataaaccaacctcacatcttacaacgaggaaacgccgatggagaaagagcatccttcgatcggcgtttttctttatccatatcttaataaagactaaagacagtaacattttcagtgctaaatcactatattgcaaaaaacatagaaaacagtagctatgaagatgaaaactactaacccgttattcgcaaagatcagactatttcttattgtcctgacattgtgcgttatcgttacctgcatctttctggtcatcattcatccggaagcatggatagcaccagtatgtgtaatggccgtagcactatgcatcttgctatatcaggtatttggcacacgtaagaaataggaagtttagataaaatgttgctttttcaattcttcggcaacagcttcaagttctttgtaccattcttcaccgaatttacgaatcaaaggttctttcagaaatttatagacagggacattctctttttttcctaacagaaccgcagccttgcatacatcccaacgatgataattcaccgctttataaggtccgtaatctccaatgcgaataggataaagatgacatgatatcggtttatagaaatctgtttttccttcccggaaagctttttcaatagcacagtagcaacatcctttctcgtcataacaagtaaagacgcagtctttgttatttacaatagaagttaccaagtctccttcctggtcagtatataccaccccctgtttttctatcaccgcacgcgcttccggagccagttcatcccagataaccggcaacacttcctccagtttcatcacctcatccagttctaccggtgctccggcatctccctcaatgcaacattcacctttacaggcatccaagttacaaagaaatttctcctgaagtacatcaagcgatacaactacatcattaatctgaatcataaaacttatgtgagacaaaaaaggcggagttctactccgccctcccagttatagaaatctaaattacttaatcaaaacattcccgttcatttcagccggagcttccagtcccataatcttcaagatagttggagcaacgtctgccagacggccatcttctactttcgcagctttgttttctgttacgtaaacacaaggaaccggattcaaagagtgggcagtattcggagtaccgtcttcattcaaagcatggtcagcattaccatggtcagcgataatgattgcttcgtaatcctgtgctttagcggcttcgattacatctttcacacaagcatcaacagcaacaacagctttttcgattgcttcgtaaatgccggtatgacctaccatatcaccgttagcaaagtttactacgatgaagtcatatttgttttcattgatagcagccaccagtttgtcttttacttcgtaagcgctcatttccggcttcaagtcgtaagtagcaactttcggagacggaacaagaatacggtcttcgttatcgtacggagtttcacggccaccgttgaagaagaatgttacgtgagcatacttttctgtttctgcaatatggagttgattcagtcccttagcagcaaggtattcacccaacgtattagaaacgttttctttatcgaataagatgtgtacacctttgaaagaagcgtcatacggagtcatacagtaatattgcagtcccgggattgtacgcataccaacttccggcatatcttgttgagtcaatactactgtcaactctttcgcacggtcgttacggtagttgaagaagattactacatctccttctttgattgttccgtcgaaattagcatttacaatcggtttgataaattcgtctgtcacgccttcatcataagattcctgcattgcctgaaccatatcggcagctttcttaccttcaccttttactaacaaatcataggcttctttcacacgttcccaacgtttgtcacggtccatagcataataacggccgatgattgaagcaatctttcctgctgacttttcacagtgcgcagatagttcttcgataaaacctttaccgctcttcggatcagtatcacgaccgtccataaagcagtggatgaatgtattgtcgatattatattctttagcgatgtcgcaaagtttgaagagatgaacgagtgagctatgtacgccaccgttagaagtcagccccataaagtgaacattctttccattttcttttgcataagaaaaagcagcgacaatctcaggattcttcagaatactattatcagcgcaagcacggttgatttttactaaatcctgataaaccacacgtccggcaccgatattcaagtgaccgacttccgagttacccatttgtccgtcgggcaaacctacgttttcaccgcttgcctggagctgggaatgagggtaagtattcatcagataatcccaataaggagtgggagtgttgaagattacgtcgtctttcttttggtcgcctaatccccaaccgtcgaggatcattaaaagggctttcttactcataatatttcaatatttaaattatcactctgattttccggctgcaaaggtacaaaaaagatgattacctgaacgtttaatctatgttaagttgcagagtaaaagaatacaaggctatggatattttccttactttgtaaggatagtattaaacacgttcatcaaaaaactattattatgaaagcaaccttattctgcattttacttgtattatcgggcatactaagtgcacaaacaatcgacaatcctcctttcaaagcccgttcgggaagtatctccaacattacccgcatagaacgtactccagaaagtacacgagtatacatacatgctatttttcgtccgcactggtggattaaagaaaaaggaacaagttacctggaagatgcaaccaccggaaagaaatataagtttaaaggtgcagaaggtatcgaaatcaataaagaagtatatatgcctgattccggtgaaaaagactacgtgcttattttcgaacccctgcctgaagaaactcaaacgatccaccttctcagcccgactaattatgaagggaatacatacgatatttccttgattccgcagaaaggaaagaatactcctccactagctgccgtcaagggtaactggttcaagacagacggctccggtcagtgggaatacggaatttacgattcaatcacgatcatgaataatcggatatacaccaatgaaagtatccgcaagaaagggaaacgaattgagatgaccgttaaagacaaacaaaatgggactatccgtacattgttgataaccccgcaaaagagtggcaactgtattataaaaacagaccaaacaaatgaattatcgtatacccgccaaaaggctgccataagcacaatagagccggacaatggttttcaacagttcttccgtaaagataccgcctgtctgcaaggatatatcgatggctacgacccgcgtttgggattcgagacaggacttgtttatctatcaaatgaactcacccgtgaagattatcctactgttgtgcaaatagataaagacggaagttttacatgcaagttcgttattcatcatccggtagagcaatcattaaccctcaacaatgactggattccattctatattgagcctggacaaactctcaccatgtacattgactgggaagcaatcatggctcgaagccgtgcacgcgatcattattttccgattaacaatatagcatatatgggaccgacagctcccttctcctatatactatccgattttagcaagtctattccttatcggtacgaagatttatccaaatcacaaaagacacttactcccaaccaatacaaggaacacatgagacctatcatcgcacaatggagacatattgccgattccgtatgccgggtctaccacccctccctgaaggcagtttgcctgattaaaaacaaagtaaaactgcaaacaggaaatgcattcttcgattttgcaatgagcagggattattatgccaaacaagatacggccaatcaagccttgaaagtaaaggaagatgattcgtattacgatttcctaaaagagatgccacttgacgataaaacaattctcgcagatgagaaagcggacatcttcaccaatcgctttgaatttatggctcccctccgaaaagcttattcggacgaagtcgaaggatcggtggagattccttttacttacccagaaaagcctctcttgacattcctgaaagaaaaaggagtgaaacttaatgctgaacaagaagcgataaggcaaaaacaggaaaaacttgccggacaagaaataaaaataacgcttgcagaacttcaagaagatgacaggaagaccagtgctctatttaaacaagaagaaaaactggtaaaagaatacatggactatatcaataaacagaaaccttctcaaaaagaaaagtcacagcaagaagaagatagggccagcataacaatggaacagaaatatgaagagaagaaaaatgccattatcgcccggctatgcaatactcccaatcctctgctctggcaaatagccaaagtacgccgtctcacttatgacctacaaaatataaaaacaaaaacaattgcccgtgaatatatagacagcctcaagcaagaatttactgcccccttcttagttgccgaaactgaacaattgtttgaaaatgcttatccttcggaagatgctaaatcataccaactcccggaaggcaaagcaaccgacattttccgcaatatcatcaagaatcatccgggcaaagtactatttgttgacttttgggccactagctgcgggccttgccgtagcggaatagaagcaacagcagacttgcgcaagaagtacaaagatcatccggagttccagtttatttatatcaccggagaaagagaatctccggcaggagcttacaaacaatatgtcgaaaagcatctgaaaggagaagcaagttattatgtcaccggaacggaatataattacctccgccaacttttccatttcaacggcattcctcattacgaactcgtagagaaagacggcagtatctccaatgaaaaattaagtagttacagtatcggacaatatttgaagaaacgtttcggtacttccgaaccttcggaaacagagcagcacgcagagtaagtacggactgcaaacagtagaaattcgaaaaaaacggtgcaaaagaatggaagccagcttgattttccgtacctttgcaccgcttttacattaaaatcatagaaatatggacgattcaaacccgcgaacgtgcacaactagtattaattaaagcgaacagagtcattgaaatctgatgtctctgctcgtgctaaacaaacgaaaggagacaataagatgagaacgtatctttattgtgaggccggctttgtggaaaaagcacaatggcttcctaatagctgggtaaacgtagtatgcccgaacaatgatgactttgaatttctgactaaaacactcaacgtacccgaatcatttcttgatgacatagccgacacggatgaacgtccgcgtacggatacggaaggtaactggctgttaacgatcctgcgtatccctgtgcaaaacaagcagaacggaagcctgcctttcgccactgtacctatcggcataatcacaaacaacgagattatagtatccgtatgttaccataacaccgatttactaccggatttcatcgagcatacccgtaggaaaggtattgtagtccgtaataaactcgatctgattctccggttgatttactcttccgccgtatggttcctgaaatatctgaaacaaatcaatatagatatcagtgcagcagagaaggagttggaacgcagcatccgtaatgaagacctgctccgtctgatgagattgcagaaaaccttggtttacttcaacacctccattcgtggcaatgaagtgatgataggtaaacttaagactattttccaggatacggattttctggataaagagttagtggaagacgttatcatcgaattgaaacaagcactcaatacggtgaacatttacagcgacattctcactgggacaatggacgccttcgcctccattatctcaaacaatgtgaacactatcatgaaacgtatgaccagcttgtctatcgtcttaatgctccctacattgattgccagtttttatggcatgaacgtagatattcatctggaagaagtgccctttgctttttctttgattgtactcttctctatcggattgtccacgctggcgtttgtgatattcagaaagatcaaatggttctaacatacaaaagcctgtcatctactattgagtaaatgacaggccgtaatttaataatacgttttttcttctatagagaattaattaaaagagaatgtttagagagagaaattattttttatccttgtttactttttcttccacccaacggaatagaaactccaacaaatccattaacagtgttagagttctttcctaagaacatatagtcggttccgaggaacaacggccctaatttcagaccaagaccgaaagattttcctgctgactgaatggcagaatagctaagtgcaacgttaaaccagcttttcggacgataatttgcagagaatgtcaactctgtaagagcgtcaggttgtacaaaacgagtggtagacaatacaccaacagctaatttgttattgaagaaaccgtattctgcacccaacaccaatgtagaagccagacgggacttacgagattcttttgcatcacctacttcgagttgcaacatatcatagtcgagtacatcaccgttagttacacgatccatatacccttgagtatcatcctgcaactgctttactgcattcatcacagatgtttcaggattagcgggatcgaccattgctgcataagtacttcctttaatatcaataggatccggattggctgacgcaatcttcgtacttgattttgaccaagagataaaacctaagtcaagaatagatgcagatacagtcagattatccaatattttataagaagcacccaaatcaataccaaaaccgtaaccagcgatacccaatttgccactatcaaattcgaagtctgttacataatccttaccctcttcttcttgtaattccaaacctttgaaagaactcttcaattctgcaccaacattcaaatttgcatggtaattatcaaattttgctttcaattcagtagcttgtttaatagcttcttgttggcttaagccactccaataattttcatctgaccactttgcaatctctgcatcactgggcagattagcactcattgccacatttttgagttttaactccatattaccgatacccaacaaagctttcactctggcaccgactgtcaaacgactgttaatctgacgtgagagtcctaaaccaatttcagtataagcattgatattcaattgctgaccactgatatcatagttactgtttctccagttttcttcaacagtctccatctcattcaggaaagtaaacatagatttagtcaagttcgcaccaatatcggtacgaagaccaatgttgaacgaccagaagttctttcctttgtaccaaccggcagaaaggatttccgtactaaagttcacattcaacttattgttatctttcagccggttcatgaaatccggtttcgtatagaaatcatctccgtcatcaataatatcaataatatcctgatatcctaatgaagtagaccccacggttgcattaactgcaccaaccaccggaagattgaagtaacctttagtcggtgtcaaagccggattcagctgttgacgataatgcgtaccttccataaaataagaagtacgcaagaactgtgcatttgcaggaagtgcacaaactaacataatgaaaaataccccaatgagcttagtagagcttagtagcttgttcgttgccatgattttaaactttttaattcttattattgtttgcaaatatatagcatttcaataacaattaaaagcacggagcaacacttttttagcctaaacagaacaattcaagcactaaacaggctaaaatcgtgcttatactgcaaaaaaatgtagaaaatataatttaagaaaggaacaacgggaattaaaagtccaaagaaagttgttcacctcccaacaaattgaacgtcatccgatgataaggagttgttccatgttcggcaatggcggcacggtgttttttggtaggataccctttattacggttccagtcataatagggatactcttcgtggagacggttcatataatcatcacgatacgttttggccagaatagatgcagcagctatcgaaaggtattttccatcgcctttgattaccgtggtatgcgggataccgggatatttattgaaccggtttccgtcaatgagcaggtgttcgggacgggtggacagttgatcgacagcacgatgcatggccaggaaagaagcacgcaggatatttatctcatctatctcttcgggtgaaacaatacccaccgcccatgctatcgcttcacgttctattacctcacgcagggcataacgttgtttctccgtcagttgcttggagtcattcagtaactcattcttaaaatctttcggaagaatgacggcagcagcatagacagaacccgccaaacagccgcggcctgcctcatcgcaccctgcttctatcagattctcatttaaataaggtaatagcatctttatcgtttttatctctgcaaaggtaaatgaaataaaaaaggagacctagattccggtctccattttcttatctttttaacacaaaatccttagaacagactccaggcaaccgtaagtcctgccattacaatggctaccatgctcataagctttatcaatatattcaagctcggaccggaggtatctttaaacgggtcgcccaccgtatcgcccaccaccgttgccttatgaacctcacttccttttcctccgaaattgccttcttccacatatttctttgcattatcccaggcaccaccggcatttgccataaagatagcgagcacgaaaccgctgctcaaaccaccgatcaacaaaccaagcacaccgggaacaccgaagacaagtcccgtaaagatcggggcaatgatagcaatcaatgaaggaaccaccatttcgcgctgtgcccccttcgtagagatttccacacaacgttcgtagtccggttcggcttctcccgtcaggataccttttatttcacggaactggcggcgcacttcgtccaccatgtgtcccgccgcacgtcccacggcattcatggtcagcccgcagaacaggaaagccatcatagagccgaggaacatccccgaaagtaccttcggattcatcaggttcacttcataatagttcatgaagtcaatgaaagtagcatttgccacactgattgtatttccgtccgagaaagtcagatccatattgccgagacgagtcagtccgatacgtatttcttcaatataagaagcgagcaaagccaatcccgtcaaggcagcagaaccaatcgcaaaaccttttccggttgcggcagtcgtgtttccgagagaatcgagcgcatcggtacgtttgcgaacttcttcacccaagccggacatttctgcgtttccgcctgcgttatccgcaatcgggccgtaagcgtccgttgccaaagtgattcccagcgtagaaagcataccgacggcagcaatgccgattccgtacaaccccataccgatattggcaaaatcgccggcagcagccagtagataagaagcaatgatacccaccacaactgcaataacggggatagccgtagaaagcattcccagaccgatgccggaaatgatgaccgtagcaggtcccgtcttcccgctttcactcaacttctgagtaggacgataggattgggaagtataatattcagtagaacggcctatcacaatgccgacaagcaggccgacgaccaccgcacaggagatccaaacccagttctgcaactgcaaaagccacaggataaagaaagtagcaacgacgataagtacagaactgaggtttgtaccgaacgccagcgaaccaagcagatctttcatcttcgcattctctttggtacggacggcgaagatacctataatagaaaggataatcccgacagccgcgatcaacatcggagcaataaccgctttgaactgcatagccgtgtccgaagaatgaataaaggcggcagcaccaagcgcggcagttgccaggatcgaaccgcaataagattcgtacaagtcggctcccatgccggccacgtcacccacgttgtcacctacgttatcggcaatagtggcagggttgcgcgggtcgtcttcggggattccggcctctaccttacctacaaggtcggcccccacatcggcagctttcgtatagataccaccgccgacacgggcgaagagtgcctgagtggaggcccccataccgaaagtaagcatggtggtagtgattacacagagtttatgagtcggtgtcagtgcgtcagcaggaatcacttcgttcagcaacaaataccagaaagaaatgtcgagcaggccgagaccgactacgacaagtcccattaccgcaccgctccgaaaggcaatcctcaatccggcattcagcgaaccgcgtgccgcattggctgtacgggctgatgcataagttgccgttttcatccccagaaaaccggaaaggccggaaaagaaaccacccgtcaggaaagcgataggcacccaagcattctgaacgtggaaaccgtaggccatgattgaaaacaaaatgaccagccccagaaacacccagcctacaatcttgtattgctgtttcaggtaagacatagcgcctttgcgcacagcagcggcaatttttatcatttggggagtaccttcactctccttcatcatttgcttatggaagtaataagcaaagcagagggctaacacggaagcgaccggaaccagccagaaaagaatgctatccataggattaatttttaaagggtttacggaggctaaaagtatgaaaatcaaacgaaaaaagcaagtaagtaagattattttttgaacagtagatgtactcactttaattgccatgtcattcctctctttccggcaagcagcttgtcggagggtttgttaagtgggactttatgggaagagaagccggtatagttcgattggaataccggtatagttaggttggagcaccgctttagttagtctgccacggccatggagagttctttccacaggcgtgacgagatattaccacgggtgtgacgaatactctccacggccgtggcaaattaacaatatcggtattccgacagaacaatacctaccggataacagatgtatagcgggtgtataagctatgtttaacggtgacttatttaccgtagaatttagcatcagcatcaaaatctggcccgtacatcataaattatcattatctttgagcgtttttatgcctgtaaactaactaatacccaataattattactcaaaacaacatgaagaaactatttctactactaatggctttgtttaccttggcacaagtgaaagcccaggaaaagagtgttatccaaatctcaacggacaacacagacctaatccttcaagtagcccctaacggccgactttatcaggcttatctgggtgacaaactactaaatgagcaagatatcaagcacttttcgccttatgtaaaaggtggcagtgacggcagtgtttctacacgcggctgggaagtctatccgggttccggtgccgaagactatttcgaaccggctgtggctatcactcacagcgacggaaatccaagtacgattctccgctatgtatcttccgagcagaaggccgtgacaggaggaacagagacaattatcaacctcaaagacgaccaatatccggtagaggtaactctgcactacatcgcttatccgaaagaaaacgtcatcaagacatggagcgaaatcaagcacaacgagaagaaacccgtcaccctgtggcgctatgcttccacaatgctctatttctccgactccaagtatttcctaaccgagttcagcagcgactgggccaaagaagctcaaatgagcagccagcagttacagttcggaaagaaagtaatcgacaccaagttgggcagccgtgccgccatgcatacacatccgttcttcgaactgggattcggacaatcggcacaggaaacacaaggccgcgtgatgctgggtacgatcggctggaccggtaacttccagtttacattcgaagtagacaacgttggtaacctgcgcgtaatccctgccatcaacccttatgcatctgattatgaattgaaagcgaacgaagtattcacgactcccgaatttatgttcactttcagcaataacggaacgggcgaggccagccgcaaccttcacgcctgggctcgcaactatcagctgaaagacggacaaggtgaccgcctctccctactgaacaactgggaaaacacttacttcaaattcgacgaacaactcctttccgaactaatgaaagaggccaaacatcttggggtagatatgttcctgctcgatgacggctggtttggcaacaagcatccgcgcaacagcgacaatgccggactaggcgattgggaagcaatgaaatccaaactgcccggcggtatccctgctcttgtgaaatccgctaaagaagccggagtgaagttcggcatctggattgagccggaaatggtcaacccgaaaagcgaactctttgaaaagcaccccgactgggctatcaccctgccgaaccgcaagacttattactatcgtaaccaactggttctcgacctcagcaacccgaaagtgcaggactttgtgttcggcgtagtcgacaacatcctgactgagaatccggaagttgcctatttcaagtgggactgcaactcaccgatcaccaacgtctattctccctacctgaaaaacaaacagggacaactttatatcgaccatgtacgcggcatatacaatgtactcaaacgtgtgaaagagaaatatcccaatacaccgatgatgctctgctccggtggcggcgcacgttgcgactacgaggccctgaaatatttcacagaattctggtgcagtgacaataccgacccgatagaacgtctgtttatccaatggggattctcacaaatcttcccttccaaagcgatgtctgcacacgtgactagctggaacaagaagacaagcgtaaaattccgtaccgatgtagccagtatgtgcaaactgggcttcgacctcggactgaaagagttgaatgcggacgaactgacttactgccagaatgcagttgccaactggacacgtctgaagaaagtgattctggacggcgaccaatacagactggtctctccttatgacggcaaccacatgtccgtgatgtacaccgcaccggataagaacaaggctgtgctttatacttatgacattcatccgcgctatgctgagaaactgcttccggtgaaacttcagggattggatccgagtaagaggtataaggtgaaagaaatcaacctgatgccgaataagaagtcgaatctgggcgctcacgagaaaacttattccggcgactatctgatgaaaataggtatcaacgccttcactaccaatcaggctttcagccgtgtgattgagctgactgcggaataagagacaacttcccatttcgcaggcaacctgtccttctcaagaggtcaatcaggttacctgcgaaaaatttctttaaaaaagtgaggagtaaaaccgacttctcccattatggtaatgtcactgcttgataaatagggccaacaatataagcagtaatattaattttaatccaaagaacattaccatgaaaaactccggatattgtttaagcctcatctgcctctttatatcgttgtgtctatacggatgtaaagataacgcggaagaaagtataacggaaatctttgaaatcgcgacagaggatctgatacagaacttcagtaaagatgcagcaaacgtcagcatctctatcaccacaaacttaaacgtagataattgggaagcgaaggttactgataaatggctcagggccacacaattcaaaaacagtctgaaaatatcagtagacgccaatatcggttcgaacagacgtaccgccaacgttaaagtatcctctgcaactaaacattataccattacagtcacccaatattccgccagtgacattgtaatcgaagaagatatacaggtaaaaccctacgccggtaaggcgagcgaagaggaaacggacccggaccggagcatcgagcattcctttgatgataaatttattgccgacggcggagtaccttaccacagtaaatggggacaatcggccgatttcccggttatcctggaatactatttcgagggtaatacggatattgattatttcatctatcacactaattcaggaaacggcacattcgggaaatttgacgtatatacgcagacgaaagaaaacacggaatacgtgcatcagggaagctatgacttcaatatgcgcaactctccctccattgcctcactcaaaactccggtaaaagccaccaaagtaaagtttgaggttcatagcgggaaaaacggatatgtcagttgtgatgaaatgcagttcttcaaaaagaacaagaaaaacactctcgaagaacagttgctgactgtctttacagacattacctgttccgaaataaaacctgatgtcacgcaagagcagatagaagcattacccgaattcttcatacaaacggcatcggctttaaaagacgatagttataataaatgggaaaaggaattccggatacgggaatattgtccttacagctccgccgacgaatgggcggataagctgatgacgaggaaatacggagatctcgacaatcctacaggaatctatgtgaacgaaggagatgaggtagtcgtactggtaggagacactcacgggcaaagtatttcaatccagaatatcggggaagaaacaagcaaaggttatgcacaaacttctgtcaacggtgatatctatcccctgaaggaaggagtcaacaaactgacagccaagcaaacaggtatgttgtttgtaatgtacaatacgaacatacaaaaccccgatgcacaaccgattaaaatccatatcccgttaggcggaggtaaagtatgcggattcttttccttaaaagagcatcagaccaatgagaaatacaaggagttaatagacaaagccgactataaatatttctgtgtcatcggcaacgccatcatcctctattttcatcataagcaactgaaagcagcagtgccgtatgatatcctgtcgtctatcgaactttgggacaatatgatccaatggcaacaagaattgatgggcattgaagacgtacaccccaaacaaatgaataatcatatttttgccatatctcccgaaggcggatatatgtgggcttcggaaggcaggataggatttgtatataccgttctgggggatatcctgcgcaaatcttatcttatggcctccagaaattcctggggaccggcacacgagatcggtcatgtacatcaaggtgccattaactgggccagcacaacagagtcctccaacaatttattctccaattacacgatttataagttcggtcagaactgctcccgagggacagaactagctgtaccggaatatgcggctaacgtcaagaaagccacattggtattcagaagatgtgtagaaaataaagcctggtgcgactttggaaccgactatcagggagaggacccggaaatgcatgcacgcatgaactggcaattatggaattactatcatcgctgcggatataatccccaattcttccctactcttttcaaattgatgcgcgaaaaccgtgtatcaacccaagacccgggagaaaatcaaatgatgtatgccagaatggcttgccgggctgctaacgagaacctgacagatttctttgaaaggtgggggttctttgtcccgatctctatgaaggtcaaccaatacggtacgtacaattacattgtcacggacgccatgattaaggaaacgaaagaatttatgaagcagtttccggctcccaaacacgctttctactatctggaagacagaaagaaaggtgaccccggactcgatacgactccaccggatgtcggttacttcactcaatttgcagaggacatgaaaatcaccaagcaaattacttatactatatccggacatcaggtgaatgttcaaaacggagaacaggcagtagcttttgaaataaaagagaatgataacctgaaatatttcggtacttcttttcagtttgaaattcccaatactatttcaccggatcgtgtcaaattatacgctgtacaagcagacggtgtacgaatcgaaatgactcgtaaataaaatcaatgattagtatggccctattaatcaacagtatatatttataatcaataacaatctaaaaaaaacaccatgagaaaagtcttactattcgtgtgcctgttaatggcaggaatgacagtcaacgtaaacgctgcaaaacaaaaagccaagcacgtcatcttaatcggtatggacggttggggggcttacagtgtccctaaagcggatatcccggctatcaaaagtctgatgaccaacggatgttacacacttcatagccggagcgtactcccttcttcgagtgctatcaactgggcttccattttatgggagtgggaacagagttacatggatacaccacctggggctcgaaaactccggagatcccttcacgtgaggtcaacgaacgggggatcgctcctaccattttttctgtcttgcgcgaacagcgtcctaaagccgaaatcggttgtttgtatgaatggcccggaatcaaatacctggtagatacgttagccatgagttaccaatatcagactccgggatacgccaaagctcccactgccttatgtaaagcagcagagaagtatattattgaaaagaaaccggaactgctggctatctgcttcgaagaacccgaccacaccggacataccaaagggcatgacactccggcctactatcagatgttgaaagaactggatggatatgtggaacgtatcctgcaagctattaaaaaagccggtatatgggatgacaccattattattatgacggccgaccacggtggtatcaaaaccgggcatggcggcaagacactgagggaaatggagattccatttattatttccggcaagaatgtccgcaaaggcatggaaatcaaagaaagtatgatgcaatatgacactgcggcaatgattgcctatatactagggctgaagcagcctcaatcttggattggacgtccggtaaagacggttttcaaataagatcattactataatagttacttatattacaaaaagaatatggatactgcaaatcacacaaggcggagaaagtccggccatgttttcttgcagtatccatatcacataaatatccgttcaaactagtcttctttttatagtaaacagaaatcatcattagctctccgatataatttaatttattttttatacttttgccacatgttgctacaaaatacaacagttgttaatcattctagtacaattataacaaagtacacagagtacacgtgtatgaaggagagtaaaatgcattatcaaactaaagaggatgcggaattatgggttctgctaatcaaaggagacaagctggctttagaaataatgtaccggcgttactttccgcacctgttgaattatggacatacaatctccacaaacgaagaattaataaaagattgtattcaggatctctttgtcaacgtattcaacaactctaaattccgccccatagaccatgtcaaatcttacttatatacagcccttagaaacaatctcgtatataagatgtcctcgatgaaagagacgtaccaattagaaaatgcagagtttgagattccattgacagatgatgaactggaaggactctttgcacacgacgatacttatctggaaagaagcaaattgctaaaggaggcctaccggaaattatccgccaatcagcgtcatgccgtttatttgtactatatcaaagaacttacatgggaggaagttgccgaaatactaggtattacagtgcactcatccatgaacctgatagggagagctattgtcaaattacgacgtttatttgaaaataaataatttttttccataaaagtgaggagtaaattcgtttttcccattataataacagaacagtcgaatgatgaaagaagaaaaaggaaatattgaacaaatgagcgaacggttgttccactaccttcgaaagagagaaagttccgcttcccaagaagcagaagacgaggtatggagcaaaatcagtgagcaaatagacaagaagaagcatattcccgtctatcgctggcttataccggtgacagctgttgctgctgcttctctcctgtttgtattctggctgaataatcaagcttatgatacgattcattcggcagatgttcaagagtttgtatctgctgcaaatactccggagaaacatattgagctgattacggctaccggaacaaagataaaagtagatgaaaaagctaccgtggcttatgcacaagacggttctttattaatcgacgagaagaaaatcgcgacccgacagagtaccggggaaggagaagaagaacatcccatgaaccagattattgtaccaatggggaaacatatcaaattacaattgtctgatggctctcaactggatattaattccggaacgaaagttgtttatccccaaaagttcaaaaaggaataccgggaaatattcgtcgaaggagaaatattcatagatgtgactcataaggaaagtaacatcccctttatagtaaagacatcactctttactgtaaatgtgctgggtactgccttcaacgtaaaagcttataaagaagatactaaagccgaagtcgtattagtacggggaaaggtggaggtaaaagacaaaaaggaacagaattatacgctgatgcctaatgagctgattgctctgaatgaaggaacatatactgacaagaaaaaagtcaatgcgctcgattatatcagctggattgacggcattctgacattgaataatcaggcactaagtatagtattagagcagttacaccgctattacggaaaagaaattatttatgatacaggtatagaaacaatgccgatgcacgggaaacttgatttgaatgaagggttacagaaagtattgtcaactattgccataacggcacctgttaccatagaagaaaagaataatatatattatgtccacatgagaaaagaaaactaattattaatcttaaaaacatcgaatatgcctatgatatgaaaacacacgaaaaatccgaataatattcgtagtattattcggattagctaaaaacattacctatcaacattaagtagcgttcttaaaattacaaaattatggaaaactgtaaatttactacaagcaggagtgttaaaagatacaaattcctgtttgtattggcaattcttttatcatctttcttatctgtctatgcagaagacgtctctaactatgtagaggaaaaaacattcacattcagtttcgagaatgtacctctaaaacaagtactgagccatattgagaaaaatagcgaatttatcttcgtctattacggagaaaccattaatcccaaccgcaaggtatctattaaagtaacgaaccaaccaattcgtccggtactcgacaaactatttaaaggtatgtcggtagaatatacaatagacaacaggcagattacactcaaaaaagtagctcaaaagaaagttcaaccgcaaagttctaaaagaaaaacaatacaaggatttgtattggataaggacgagcaaccgatcaccggggcaactattaaaattaaagacagcacgacaggtgctctgacggacattgaaggtttctacaaacttgaacttgaggaagaaaatccggtcctgatagtctcatttatgggatatatcacccaagaagtgaaagtcggaaagaagagtatactcaacatccaactggaagaagacactaaggcattggatgaggttgtagtcacagcctttggtatcgggcagaaaaaggaaagtcttgtcggagctatccaacagatacgcccggaacagctaagagtaccttcctcacgtttatcttcttcttttgcgggacgtttatcaggagttatcgccgtacaacgaagtggcgaaccgggagcagacggcgccagtttctggattcgtggtgcttctacattcagtggcgcaactgatcctctcatcatcctggacggtgtggaaattgacgcaacccaactgaacaatctcgatcctgaagtaattgaaagcttctcaatactaaaagatgcaacggcaacagcactctatggaacaagaggagctaacggagtgatggtagtcacgacaaagaatggggaaaatctgaaaaagccgatcattaactttagagtggaaggggctatatcacagttgacaaatgttcctaaaatggtagacggtatcacttatatgagattatacaatgaggcacagacacgtactcccgagactaccgatatctattcggacgaaaagattaatgctacaatagacggtgtcaatccttatatgtatcccaacatcgactggtacaacgagatgttcaagaaaaacacttttgccgaacggttcaactttaatatccgtggcggaagcagccgggtagattattttatgagtgcaagcgtcaagcacagcgacggtaatcttaaatcactcagtaaagacttctactccttcaacaacaatatcaatgtctacaactatgattttgtcaataatctgaatatcaaggcaaccaatacaactaaaatatcgctaggactaaatgtgtcggtacgagactggagcgggccttatagtagtgccggaagcgtattctcaagtgcactcaatgcaaatccggtagactttccgatccgtttccccggccaggaagatgacactcacatccgttggggaggaagatctggtgctccgaacggaagttatgtcaatcctgtcgccgattttgtatccggttacagttccacgtactctacaagtgtaacagccaacctgcgttttaatcaggacttgaagatgattatgaaaggactgaaactgaatgctattgtttcatattacaactattcatattctaaagtgtatcgttattgcaacgtcaaccaatatgagacttccatgtataatccacaagaagatacatacgacttaaacatcatcggcaacgaacaaagtaccgagcttaaaaccggaggttccaatagcggtaaccgtagattatatctacaagccagcctggattataacagaacattcaatgacgtgcacaaagtcaatgtcatgttcctatataatcaagaacagaatgacgttaacaacccttcggacttgctgacatccttacctagaaggaaacaaggtatagcaggacgtttatcttacggatttgccggcagatacttagccgagttcaactttggctacaatggttctgaaaatttcccgaagaataaaaagttcggtttcttcccttcagtagcaatcggatacaatctgtctgaagagaaattctgggaaccgctcagaaacatcatcccgcaatttaaaataagagcatcgtgggggcttgtcggtaatgaccagacaggagccggacgttttacgttccttgagaaccttactaactccggagccggattcacaaccgggaccggtaaccagacacacaccaactccggtcctgtatggaaaagatatgccaatccgaacctgacatgggaggttggtgagaaatggaatgccggtattgatgtgagaatattgaaaggattcagtttctctgccgacattttcaaagaagtgagaaaggaaatctttatggatcgtggaacaattccgacactcatgggacttggtaatgttacagttcaaggaaatctcggaaagatgcgtaactggggaatagataccagtgtagactacaacaaccagattaacaaagacttgtttgtctctttcaagggaacgttcacctttgctcataataaaatacttgaaatggatgagccggaattcagtttatatcctaaccgtctgaaagtcggccattcactcaatacaatcttcggatatgtagcggacggattatttaccgacgaaaatatgattaacaatagtttgccgcaacaatttgccaatctgccgctaatgcccggtgatattaagtacaaagatattccgaatgcattaggaggtacggacaatgcaatcaatgaatatgacaaagttgccttaggttatcccagtgtaccggaaattgtatatggtttcggcccttccattaaatacaagaatctggacttctctttattctttcagggaaccggacgcgtatcattaatgatgagcggattccatcctttcaccaacgataacaataccgccaaaagaggcatattagattacgtagcagatggatgctggacaacagataatcctaatccgaatgcgtcataccccagactcacgacggcatataacacaaataataaccagaattcaacattctggctgagaaacgccgcttttttaaagctcaagaatgcggaaataggatataatttcaagaatatgagaatttatgtcagcggcaacaacctgctaacattctctaaattcaaattatgggatccagaaatgggaggtggctccggtatgtcctatcctactcaaagaacatttaatgttggttttcagatgactattaactgataaatatataataaaatatgaaactgagatatatttacatcattgtattatgcatcttaacaagcggatgcaattatctggatataatgccggatgaacgtgccaaactggaagactcttacaacactccgtccaaaaccgaaggttttctctattcgtgttatacttatatgccgatgaaccgcagttctcaagattcacagccgtaccgaagctggtacccgacagcattactgaccggaggagaagtaactacttattataaagctaacgaaccggaacagttgttcacaatgggactttataacccgactaacaattcaatcgtttccgaccgttggtggccgacatggaaaggagtccgccaatgctatgaatttctggatattctggataaagcccaagtttatactgaagccgatcgggagatatatagagcagaagctaagtttctaattgcttattatcatttctgttctttgcaggcattcggtcccactctcatcatcaggaagaaatatgatttggacaccaaattatctgaattaccggcacgaagttcttacgatgaagtagtagcttttattgatcaaatgcttgatgaagcaatgccggggctggttgaagctcataatccgatgtatttcggacgggcaaccaaacatgttgcacgcgctctccgctcccgtgtacacttatacgccgcctcacctttattcaacggaaacagtgagttttacagtaatttcgttgacgaaaatgggaaacatctaatttcacagacatacgacgtcaagaaatgggagaagtgtgcggaagtgacattggatgctattcagaatgcggaaaaagcaggctacaaactatacggagatgttgaagccggagctccaacccaagaaaaaccgggattcacagaccagaccgaaagcggaaaagctcagcgcagagtcagatattgtacgattgacaaccagaacctatgtgaaatcatctggggagataaccgaagcgaatcaacatacggtgtacaaattcgttcgtcagtcagacagacaaaacagatcccgtacacgcagactaactctactgcacctaccttgcagatggtcgaactcttttatacagagcatggattacctatcgataaagacaagacctatgactatcctaaccgttatcaaatagcttatctacctgcaaactttgacgggaataattatgaaaacagaccgaatgaccgctctatcaaactacattttaaccgtgaaccacgtttctattcatggataggattccataacggtaactacgaaatagcacgatataatgcagaagcacttcctttgaacaaatcttatgtacccggcggattaagaatgttgttcaatggagcacatggtttcaaaaaagatatgacggtgcactattcggtaacaggatatcttaacaagaagttcacacatcccggattcactaatgccattatcaaatatccattccccacattccggctggcggaactgtacttgaattatgccgaagccttgatcgagattgggggaagtaataatctcaagatcgctaaagaatatatggataaagtaaggaaacgcgcaggcatcccgggagtagatgagtctattcagaaatatgcaaatgatgaatggaaaggaaaagaaaatgaacaggaaactttacgccaatttgtccgccaggaacgacaaatagaattctatctggaaggacaacgtttttgggatttgagacgttggaaaatagctgaaaaactggatgaacctttcttgtgctggaatattgaaggagccagtgtagaggaattctttaaagctccacaacccaacatgacattaacgaatcatttctataaatcacaatatctgttgccaatcagtgccagtgaactggaaaagactccgcaaatcattcaaaatccattctattaatattcaccatgaagaacaatcaacttatgattggacttgctctattagctccactctcttcctttgcggaagagaatggagctaataagaaaaagcccaatattatctatattcttgcagatgatctgggtatatcggaattaggttgttatggccagcagttaattgaaactcctaatatcgaccgattatcacaagaaggaatgacattcagtaaccattactccgggacagcagtgtcagctccatcgcgctgtgtcctctttaccggattacataccgggcacgcctatatacgggggaatgacgaaatggcttcacgtggaaatgtttggaatcataaagctgtattagctgattcgaccctggaaggccaacgccccgttccggcagaaacggtaatgattccggcagtcatgaagcaagccggctacacaacggcctgtatcggaaaatggggattggggtatcccggttctgccagtaccccaaacaaaatgggatttgactttttctacggatataattgccaaagagaagctcatacctactaccctccatttttatatagaaacgaacatcgggaatatctgaataatccattggtagtcccccacaccaaactggataaaggtgcagacccatacgaagaaaaaagctatgcgaaatatactctcaatgagtatgcaccggacctgatgtacaaagaaatactcaactttatcgaccttactaaagataaccctttcgtcttattctggacgacgccccttccccatgttcccttacaagcaccggaaaaatgggtaaagcattatgtgaacaagtttggagatgaaaaaccatacacaggcaataaagattattttccctgccgttatcctcgcgcaacctatgctgccatgatcagctactgggatgaacagatcgggggacttattaataaacttaaagaactgggaatctatgacaataccatcatcatttttaccagtgacaacgggccgactttcaatggcggaagcgattctttctttttcgatagtgctaaaccattcaaaagtgaatggggctggggcaaagcatcgctccgcgaaggaggcattcgtgttccgatgattgccagttggcctaaaaagataaaagccggtagtaaaagtgatctcatctgtgccttttgggacattatgcctactttctgtgagattgcaaaagtagaatgcccgactacggacggaatcagctttttgccggaattactaggcaaaaaacagaataaacatgatttcttatattgggaatttcccgatagcggaggccaaaaagctgtccgaatgggcaaatggaagggtattgtattgaatatttttaaaggaaacaggaaaattcaattatatgatctggattctgatcccagagaacagacagatgttgccagataccacccggaaatcgtgaaaagaatggaggatattatgaagcaggagcatatcgaaccggaactagcttcattcaaaatgcctcattagagccttaaataaatcattattcattctgcttattcggaatgaataatgatttatagtttcaatgccacctatctcagtcatcctcaatctttacggctgtaccgttagcagtcaccattagcatactgccactacctcctactgtctcgtaatccaaatcaacacctatcacggcatttgctcctaactgagcagcttgtgcctgcatttcctgcaaagcggtatctttagctttgcgcaatacttcttcgtacgctccggaacgccctcctacaatatcgcggatacttgcaaacaagtcacgaaacacattggcacctatgattgtttctccggaaacgattccataatatttcactattcgttttccctcaataatgggagttgttgttattaacattgtcttttctctttaagttatttgcaattctatatattagacgtaagccgtcctaaaaaagttgcagctataccgtaatttatttacgatatagctgccattaatgttaaagagagagaatttataatataagcatggtctcacgaccctccagatattccatgaatatttgtttctttactcattagacgcaagaaaactcaaatcactgcactttgggtattctttttttagttaaagaataaaaaaatcgctattccacagaaatagcgattcatatctttaaaacatcttgctgacacgttcaatcccggccaccaatatatcaatttccgatttcgtattgtacatggcaaacgaagcccgcactgtcccctctatgccaaggcgttgcatcaaaggttgggcacaatgatgtcctgtacggacggcaatacctaagcggtcgagtaaagttccgagatcgaaatgatgaatgtcaccgacaaggaaggatatcaccgctccacggtcagcagcttcaccgaatatacgcatagtaggaatttctttcagacgttgcagagcataagttgtcagttcatgctcatgggcggctatttgctccagaccgataccattcacataatcgagtgctttcgccagtccggtagttccgatatagtcaggtgtaccggcttcaaacttgaaaggaagttcattgaaagtcgttttttcaaaagagacatgctgaatcatctctcctcctccctggtaaggcggaaggcggtccagccattcttcctttccataaagtacaccgacacctgtcggaccatatattttatgagcggagaacacgagaaaatcggcatccaaatcctgtacgtccactttcatgtgagggatagactgagctgcatcaatcagacagggtacaccgtgggcatgtgctgttgcaatcatttccttcaccggattcaccgtacccaatacgttcgacacatgcaccacactgacaatcttcgtgcgttcggagaataatttttcgtattcgtccaacaacagttcgcctttgtcgttcatcggaatcactttgattgcaatacctttacgagcagccagaagttgccaggggacaatattactatgatgttccattacagaaaggatcacctcatccccttcttgcataaactcgtcaccaaaactggaaacaagcaagtttatgctttccgttgttccccgtgtgaacaccacttcactcgtgctgcgggcattgataaactgacgtaccgtttcacgagatgcctcgtgcagttccgtagcctgctgtgaaagataatgcactccgcgatgcacatttgcattgacggaataatactcatctaccaatgcatcaaccaccagacggggtttctgagtcgtcgcaccgttatcgaaataaaccaatggcttaccgtaaaccgtacggctcaatatcgggaaatcctcacgtatcttttgaatatccatgtttattcgctattactcatttacaaatcgcacaaccctgacatctgttcaactcaccacggaaacgtttctcaaccaacagatgcaagcgatctttcagcgcatccagacgaatggtatcaatcacttcgttgacaaacgcaaacatcagaagcagacgagcttctttctcgttgattccacgggaacgcatataaaacaatgcattctcatcaagctgtcccaccgttgctccatgcgaacatttcacatcgtccgcataaatctccaactgcggctgcgtgtacattctagcatcacgtgtagcgcaaagattacggtttgtctgttgagaatttgtatgttgggcgtcaggacgtaccagcactaatccggcaaatgcacctatcgactgatcatcgagtacatatttgaataattcattacttgtacaattcggaaccgcgtgatcaatacttgtattattatctatatgctggttcttatcagcaatcgccattccgcaaagattaatttcagcaccttctcctgccagcaatacctccgtagtattacgggtagtgccattatgcaaagtcataccattcagcaaaacgttactgtttgcttcctgctttacatacaaattactaatacggacagtacttgtatgtgtttcttccaactcatacaaatcaaacaccgtattctctcctgcaaagacttctattacctgtgttgcaaggaagttcacattatccatagcatgatcacaaatcagcagacgggcttgtgcaccatcttccagaataatcaacacacggcggttcaccatgaaattgacatctgcacgaagaatattcaccaactggataggtttttccactactacattcttcggcacatagaaaattacgccatcttgcgcaaaagtcgtattaaaggcggtcacaccatcttttgaagtatccgccagtttgccgtaatacttcttcaccaattcgggatgttgcctggccacctctttcaagctgccaaatatcacgccttccggcaaatgacttttgggaagggccttgtcatagaaagcgtcattcaccacaaaatacagggcagtgctcatattcggcacatcgcacttgaacacttcatacggattgaccggaatagccaggcgattcaggttcaaaccaaagtccggttcaaaatacttgcttacatccgtatatttgtacttctccattttgcgggtcgggaatccgactcgctcaaaatcggcaaaggcagcagcacgaggcgcattcagcacttcagcgctatgtttgcagatcatagcttccgtctgcgagaagagttctatatattgttgttccgcattcatcgtcattctcctacttctttctttatccaatcatatcctttttcttccagttcaagagcaagttccggtccggcagttttcacgatacgacctttataaagaacatgcacgatatccggtttgatataatcaagcagacgttgatagtgagtgataacaattgtgcttgtttcgggagttttcaatttgttcactccttccgcaacgatacgaagagcatcgatatccagaccggagtccgtctcgtcaagaatgcttaaacgtggttccaacatcgccatttggaaaatctcgttccgtttcttttcaccaccggagaaaccttcgtttaccgaacggttagccaatttgttatccaattcaaccaccgcacgtttctcacgcatcagtttcaggaactcgctggcagtcagcgcaggcagacctttgtatttgcgttgttcgtttacggcagcacgcataaagtttaccatactcactcccggaatctccaccggatactggaaactaaggaaaataccttcatggctacgatcttccggactcaactccaacagattctttccataaaaagtgattgaacctttcgttacctcaaaagccggattccccaccagtaccgacgacaaagtactcttaccggaaccattcggtcccataattgcatgtacttcgcccggtttcaccgtcaggttaatgcctttcaatatctctttgccattaatgctggcatgcaggtcttttatttctaacataatcacttttattttttatcctacacttccttccaaggaaatagtaagcaacttctgtgcttctaccgcaaattccattggaagtttattcaatacttctttcgcatatccgttcacaatcagtccgatagcgtcctctgtcggaataccgcgctggttgcaatagaaaatctggtcttcactgatcttgcttgtcgtagcctcatgttccactaccgctgtctcattatgaatatccatatatgggaaagtatgtgcaccgcacttatctcccaacaacaaagagtcacactggctgtaattacgagcgttatccgctttctccgctacacggaccagtccgcgatacgaattctcgctgtgaccggcagaaatacctttgctgacaattgtactacgtgtattcttaccgagatgaatcatcttcgtacccgtatccgcctgctggtagttattagtcacagccacagaataaaattctgctgtcgaattatcacctgtcaggatacaggaaggatatttccaggtaatcgccgaaccggtttccacttgtgtccaggaaagtttgctatccactcctttgcagttacctcgcttcgtcacaaaattgtatacaccgcctttaccttcggcatctcccggataccaattctgaaccgtactgtatttcacttctgcacggtcatgcacgataatctctacaatagcagcgtgcagttgattctcatcccgcatcggagccgtacatccttccagataagatacatacgaatcatcatccgccacaatcagcgtacgttcaaattgtcccgtgttacgggcattgatacggaaataagtagaaagctccataggacaacgcacccccttcggaatatacacaaaagaaccgtcggagaatacagctgagttcaatgcggcaaagaaattatcacggtaaccgactaccgaaccaaggtacttcttcaccaagtccggatgttcacgcaccgcttcgctgaacgaacagaaaataattcctttttccattaatgtttccttgaaggtagtctttactgaaaccgagtccattacggcatcaaccgccattccactcaaggccatttgttcttccaaaggaattcccaacttattgaaggtctttattagttcaggatcaacctcatccatgctcttcggcccttcctttttcttagtaggatcagcatagtaagaaatagcctgataatcaatctccggaatacggagatgtgcccatgtgggcatttccagcgtcagccagtggcggtacgctttcaatcggaactccagcaaccactccggttcgtcctttttcgatgaaatcaaacgaatcacatcctcattaagtccacgctcaatgatgtctgtatgcacctccgtggtgaagccatatttgtacttctcctgcgttagttcctttacatatttattgggttcttcttgttgcatctttattctctaatatatattgttgcgtcatactcttagcagcagggaaaaagattcccgcaaacgtttctatcggataatataacaaagattcgctcttttttgttgcactaattaacttattatcgccatccataaactctatcagacaaatcaccagacttgttaacaatagaaatttaagtgctcccagcacacaaccgagccaacggttcaaccaatccagcgaaaccgctttcattgcctttgtcagcaacgaagccaccaataagaatatcagtggaacggctatccagatgataataaaagccaatacctgtgcaacagtcatcgaatcagtcaccgttggacaaagcttttccgctaaagtggtatacaaagccttcgccgccagcaaaccgactattaatcccagtatagaagccaactgacgaataaagcctttcataaagcctactattgcgcctgcacctattataataaggataataatatcaatcgttgccatatttctctataaaaagaaaaaagaggcacggagttataattcactctgtgcctccgtttattcttaattcagtacaaattataatgtctgtttcacttctatttcttcgaatgcctcgatcatatcgcctaccttcatgtcgttgcagttcactaagctgataccacactcaaagtttgtacctacttccttcacatcgtccttgaagcgtttcagcgcattgatattcccggtaaagattacgataccgtcgcgaatcaaacgagccttgtcgcttcgtttcacctttccggttttcaccattgcaccggctaccaaacctactttcgtgatattgaacacctcgcggatttcgatagtagcagtcacctgctccttcacttccggcgccaacataccttccatagcagacttcacctcttcaattgcatcgtagatgacagagtacttacggatatcgacaccttcctgttcagccatcttagcggcagcacctgaaggacgtacctggaatcccacgataatcgcatccgaagcagcggccagagaaacatccgattcggaaattgctcccacacccttatggatgacatttacctgaatttgttccgtagacaacttgatcaacgagtcgctcaatgcttccacagaaccatccacgtcacccttaacgataatattcaattcctggaagttacccaaagcgatacgacgacccaattcatccaaagtaagaatcttctgcgtacgcaagccttgttcacgagccaactgttcacgtttgttggtgatttcacgagcttcctggtcgctttctaccacatggaaagtgtcaccggcggcaggagcaccgttcaatcccagaatcaatgccggttcagcaggacccgcttctttgatacgttgattacgttcattgaacatagccttcacacgaccatagctagttccggccaatacgatatctccgactttcagagtaccgttagataccaataccgtagctacataaccacgtcccttgtcaagtgaagactcgataatagatcccgtagcgttacggttcgggtttgccttcaagtcgagcatttcggcttccagcaataccttttccaacaaatcttccactcccatacctttcttggctgagatatcttgtgactgatacttaccaccccattcttcaacaaggtaattcatagcagccaattcttctttaatcttatccggatttgcagtcggtttatccaccttattgatagcaaacacaataggtacacccgccgccattgcatggttgatggcctcctttgtctgcggcatcacgttatcatccgccgctacaataataattgcaatatccgttactttcgcaccacgggcacgcatagcggtaaacgcctcatgtcccggagtatcaaggaatgtaatacggcgaccgtcttccaacttcacattgtatgcaccgatatgttgtgtgatacctccggcttcaccggcaatcacattcgccttacggatatagtcaagcaatgaagtcttaccatggtcaacatgtcccattacagtaacaatcggagcacgcggctgcaaatcttccggagcatcttcttcttccacgatagcctgtgccacttccgcacttacatattcggtcttgaaaccaaattcttcggccaccagattgattgtttccgcatccagacgctggttgatagaaaccatgatgccaatactcatacaagtagcaataacctggttgacagaaacgtccatcattgtagctaattcattagctgtaacaaattcggtcagcttcaatactttgctgtctgccatttcctgatcttccagttcctgcatacggttggaagccatttcacgtttctccttacggtacttggaagtcttgttcttacctttagtggtcagacgagccaaggtttcttttacctgttttgctacatcttcttcacttacttcctgtttgataaccggctttttgaaacgatccttgttattgtttcttctattattgttgttattgttaccttggttattaccaccattattattaccgcctttgccttgcacattcggtctcggagctgcaaagttggaagttgcaacgttattcacatccaccttctctttgctgatacgattccgctttttcttgttaccggctgcatccgcgttatctttcggtccgctcttagcctgtttggcatcatctttacggatttccttgataatcgcttccttcatcagtttcttctgatcctggcggattttctctttttcttcacgttcacgacgtttctcttccttcgatttcttcttagggcgagttgactgattcaatgctgcaaggtcaatctgaccgattacattaatctttgctcccagttccggctgacggatcttgaaaacctcgtcttccttaggagcgtctttttcttccgaaacgacttctgtcgatgctactgcttccacaggcttttcttcttttttatgttcttctgccttcacaggtgcttctaccttcttcggctcttccttaatcacttcttccactaccactttttcaacttctgccggtttcggttctgctacaggttccggttgtttcaccaccacaggttcggccggagttggagcaggtgccaccacctcttccttttttacttcaggctctttcttttcgggttctttcttcacttccggttcaacgacagggcgttccgctactatcggacgttccaccacaggacgttctaccacagtttcctttttctgttccggttccttttctactttatcagttttacgaccgtttaatttatccaaatcaattttaccgacaggtttaaacttcggacgtgcatcctcaggtacgactgtcttgatcacatcttccgacttcggtttttcctgttgcttttcgaagccttcaatcgaaaccgatgccttattacgatccttattctgacgttcctgaatgaaacgctccgattcaagtctaaggttcttatccgtactaaactcttttacgagtatagcgtactgctcctcgctaatttttgtattaggattagcctcaacggtataccctttcttttgcaggaactcaactaccgtcgcgattcctacattcaaatctcttgtaactttgtttaaccttatcgtcatattttaaatttaatgaataaatggagcgaagaaaatctcaatcgtaattgcctattactcttgtccttgttccggttcttcttccggttcttcttcaaactccgatttcaaaatgcgtattacctcgtccactgtctcttcttccaggtccgtcttttcaatcaacatctcacgaggagcattcaacacagcttttgccgtatcaataccgatagccttgattgcatcaatcacccaaccatctatttcgtctctgaactcgtcaagatagatatcttcatcagctacattctcatccaactcacggaacacgtcgatagtgtactcagttaacatactggccagtttgatattcaaaccgcctttaccgatagccagcgatacttcttccggtttgaggaacacctctgctttcttctcctcctcgttcaaacgaatagaagaaattttcgccgggcttaaagcacgctgtataaacaatgaaatattcgatgtatagttaattacgtcgatattctcattgcgaagttcacgaacgatgccatgaatacgactcccctttacacctacacaggctcctacgggatcgattctgtcatcataagattctaccgcaatcttggcacgttcgccggggatgcgggcaatcttcttgatagttatcagaccatcatttatttcaggtacttccatctcaaacagacgttgcaagaaaacgggagaagtacgtgacaagataatcttaggattattattcttgttgtctacgcgggcaaccactgcgcgtgccgtttcacctttacgataaaaatcgctcgggatttgttcggtcttgggcagcagcagttcgtttccttcatcgtcgagaagcaacatttcctttttccagatctgatacacttctgcattgataattgtacctaccttatctatatatttattataaatactgtctttttccagttccagaatcttggaagccaatgtctggcggaggttcaggatagcacgacgaccgaatttcgcaaaaataacttcatcagtcacctcttcgccttcttcgtatgaagcgtcaattttctgcgcctcactcaacgcaatctgcatattcgggttagtcaaatcttcatcggccacaacttcacggttacgccatatctcgaaatcccccttatccggattcacgatcacgtcgtaattttcatcggtgccaaacattttcgcgattacgctacggaacgactcctcgagtacactaaccattgtcgttctatcgatattcttcagttccttaaattccgaaaatgtatcaatcaagctgattgtttcttcttttttggccataactatttaaagctaattaagtatttagtatattttatttgctcataagtaaaggtttcgtcttcttccaccagctttggtcgcttggatccttcgagtttcaccttcttttgtacggttaccgtaaacttctcttcatcggcatcctttaggataccggtcagtttctgtccgcctttggtcatcacttccacttcttgtccgatgtggatgtaatactgctgcagcactttaaagggctgtcctataccggccgaccctacttccagttcataatcttcctcttcacggttcagtttcgattcaatgtagcggctaagctccacgcaatcttcaatccaaacgccttctgcatggtcaatttcgaccacaattttgtcatccgggctcacagttacctctaccaaaaagtaatcttttccttccagccactcttcaacaatctgacaaacagttttcttttctatcatttattagctattaagaacaaaaaaaggagcttaattgcccctccacctttcatccgttttcggttgcaaagatataaataatctattcgactacaaaacattaaagaaaaaaagtatgaattaacagtgcgatattcgtatctttacgccgcaattaaaaaaaataacaactatggcgcatcgtctcaacaccaacaaacagttcatggtcggcaatggaatcctcgcttttgccgtcatttttgtcgtagtgattttcatctatatgagtatgcgactgcaacagaagcaacaggaagaacgacattttatcgaaacatatacgattagtctggtcaaaggctttaccggcgattcaatttctctgtttgtcaacgacagtctcatttccaataagactatcatagaagaaccttatacagtggaagtcggtcgttttgccgagcagagtgcattgttaattgtagataacaaaactgaattagtatcgactttcgacctaagcgaaagagggggtaattatcagtttgagaaagaggaagacggaattaagcaactggcgaaataaacggtaaagcaagataaagacaaaggagctctttatatttctgtccgatatttcttcagttctccccgtagagcaagagcttttccttccgtgaattgattcagtagagaccaaaaacgttcactatgattcatctcacgggtatgacatagttcatgcaaaagcacataatcaatcaaataagaaggcaacaaaacgaggtaataggataaattaatatccttctttgtcgaacaactcccccaccgcccctgactggaatttatcttcacgcttgcatagggcaatccgcattgtttggaaagacggtctaaacgtggaggaagaatactttttgcattccgcctcaacgattcttcaatcacctttcgtagccaactctgcaatttctcatcagtaaagtccgcatttggcggacaaataatctgcatacatcccaatcgggaatttgccagaaactgctctttctctccggacaccaaagacaacttgaaatattctgcatcaatcttataattcaaatcaattaacggacgattcaatcgttgacgagaagccagcaacttactacgtaaatcttcaatcgcccgttttacctctttcatcgttgtgccggaagggactgaaacgtataccgcatcactctttgtacgaaagacaagacttttagcacgcaaattaacacgcactattaaccgtccaagttcttcatcttctataattgcctccttcatcataagtctcctaataacaggtacaaaagtaataaaaaaaagattcttccactcttagaaacataaaagggctactgcatctcgcggtagcccatttatttagttagtttcattataaaaatttgagagaattgaaaacttcacagtttcgctttcgatgttgttttaattaagcacactaactatattatatgtttaaagcaaatgaaaatgtctattcattaataacctgcatcttgtggttgatcttcgccagactatcagccaagacctgatccgctttcacatcgttcgagatagcgaccgacggtgcagttacttgtttaccaatggtatctgtggccaatacacttccatcatctcccgagaaagaatgttgtgccacatttcccaatccgagaatgattgcaatcacggcagcggctttgaacagaggaataaagcgactcgtcagtgtcagacgttttgctttcactaccggaacctccacttctgccagaatacgtgcatcaaagtcctcacccagccctacttcttgctgaacctgctgataaacaaacaagttcttatagcgaagcaaatgagccggtacgtcttctttcgagaagaagtcacgcaatcttgattcctcctcaacggaagtttcacattgccagtatcgctccaggagctgttctatatccttataatccatattcgtcaatttctaaatacctttgttttaccttttgcctggctctgaagagattcactttgacttgttcctctgtcagattcagcagggttgcaatttttttatagctttcaccttcaatgtccctcagttgcatgataagccgctgtttttcgggaagttcgttgaccaacctattgatgatgttcattttttcatcatgaatcatccgatcgtacggactgtttgcatcaggttcttcctccatttcgggggtgagttccacgttttgagcctctttcttctgactccggtctatcgcaaggttctttgccactatcaggcaataggcttcaaccgattcaaattgcgaccactcatcacgcttgctccacactcttatcatggtgtcctgaacgacatcctcggcttctgccctatccagggtgattctgagcgccaatcgaaagagtttgtccttcaacggcaaaatatcgtttcggaagctgatttcttgcatctctataataatgacgggctaggattcgaaaagttacagtcgcccactacttttttttgaattatttttttatccgggttcctccgttgccgttaatcgctgatgctaaggtaattatcacttcagacaccccagcatttattgcttcaaaagaattctccagtttcggaatcatacctccttgaataacgccatcggctacgtattgttcaaattccgcacgggtaatctgaggaattacactatcgtcatcattctcatcacgcagtacaccttttttctcgaaacagtacaccaatgtcacatcaaacaggcccgacaaggcttttgccgtctctccggcaatagtatccgcattcgtattcagcatattcccttgtccgtcgtgtgtcaacggagccataaccggcaccacacctttgtatatcaagtcagacaacagagaagcatccaccttctccacatcgccgacgaaaccgtaatcaacttctttcaccggacgtttcaccgaacgtatcacgttcatatccgctccggtcaatcccagcgcattgacaccatacgcctgcaacccggcaacaatattcttattcaccaaaccgccatacaccattgtcactaccctcaacgtttccgcatcagtaatccggcggccattgaccattttgctttcaattcccagttgtgcggctatctttgtagccgaacggcctccgccgtgcaccagcaccttatgtccttcaatagcggcaaagtcgtttaacaactgacgaagggtggcttcctcttctacgattttgccacccaccttaattacagttagtttttctctcatttttattctaaatacgtatatccataaagtcccgaacggtagttggaaaggaattcttttccttcttccaaagagattttgccttcctttactgatttcgtcacccaagtttcgagcgtacgaaccaacttcttcggattatactgcacgtagtccaatacttccgccaccgtttctccgtcaataatctgttcgatattatatcctttctcgttcacagagacatgcactgcattcgtatcaccgaacaagttgtgcatatcccccaaaatctcttgataagcacctaccaggaaaacagctacataataaggttctgttttcttcaggctatgtacaggcagataatgagctacattacgggtagagataaagttcgcaatcttgccgtcggagtcacaggtaatatcctgcaaagtagccgagcggtccggtttttcatccagccgttgaataggcataatcgggaatatctggtctatcgcccaggaatccggcaacgattggaacagtgagaagttacagaaatatttatccgcaagcagcttggacaatcctcggaattcgtcaggcgcatgtttcaggccttcggcaatctgattaatctcacgtgtgatcgaccaatacaggcgttcaatctgtgcacgggttttcaagtcgacaattccgtgactgaacaaatccaacgcttcctcacgaatctgttgcgcatcatgccatgcctccaacattttattctgattcaacgaatcccaaatgccatataattcctgcaccagttcatgtgcatccggagcgattacttcttcatcatcccattcgggtaaagtggcagtctccaacacttcaaagataagcacagagtggtgtgcagtcaatgcgcgtccgctttcggtaataatattcgggtgggggataccattcttatcgctgacatccaccaatgtagaaatcgagtcattcacatattcctgaatagaatagttcacgctgccttcgctgttggacgaccgggttccgtcgtaatcaactcccagtccgccgccgatatccacaaattccactttgaaccccatagcatgaagttggacataaaactgtgaagcctcacgcaaggcggtcttgatgcgacggatcttcgtcacctgactaccgatatggaagtgaatcagtttcaggcaatctttcaatcccttgctttccatgaaatcgagcgcttcgagcaactcactggaagtcagcccgaatttgctggcatcgccacccgattcttcccattttccgctaccggaagaagccagtttaatacgaataccgatattaggttgcacattcaactgcttcgccatttttgcaatcagtttcagctcattcatcttctccacaacaaggaagatacgtttacccattttctgggcaagcaaagccagttcaatgtaactctcgtctttatagccgttacatacaatcaatgagtcagaatccgtattaacagcaatcacagcatgcagttcaggtttagaacccgcctccagtccgagattgaatttctttccgtggctgataatctcctccaccacagggcgcatctggttgaccttaatcggatagataataaagttctccgccttataaccgtattcttcggctgcctgtttaaagcaggacgacatcttttcaatacgattatccagaatatccggaaaacgcaccaacgtgggagccgctacatctctcagttgtaactcgtcgaccaactctttcaaatcaacagctaccccatctctacgcggtgtaacaacaacatgacctttgtcattaataccaaagtacgaggttccccaacctgtaatgttgtagagttcctcagaatcttcaatacgccactttctcatttttctgtaattcagtgtttttagtaaataattggacggcaaaaatacagatttatctacatgttgccaattaattagacattatttctttcagtcggtccatatatccgctgtttccgttacgggcgtcatagcgccgtgccagttcttcagcctgctgatagaaataccggcgtaattcgctgacagagtaaaccccgtccgcgcggtaaagagggaactcctccggcaaagccagatgaacctccggacgcatctcatacttcaaggcctccaccatatcacaggagaaacgatatttcttcaacgtattggtacgcaggctccagtcaatacaccgttcggcatactcccagccgcgctccggattcgtcattaaataataagcgataaacagccccatatagagcaacagatactcgtccttctctcttccggccaaagcttcttcggcacgtgtacacatatcggcggcaatatccggcttacccgctttttgtgcataataagcaagcttcaggtaagcacgcaggttagcttcatagcaagtcacctgtttgttaatcaatggctgcgcccggctataagcctcatcaaactttcccgtttccagataataatccaacataaagttcagttcacaagcctcacacgactggtcgtccattttctccgccagcatcttatcaatatattcctttgccttgtcatactgcctcatccatgtgcattccaccgaccagcgctgataaaaactccgtaaagaatatccgttccgcaagatacgggtcttataatcctcccctaccgcttccacctgttccattggaatctccggaatatcaaaagtcgaagaccatatccatttatacttccacagcagatcatcctccttgattacatccttatgattctcataatcatccagaatcttagagaacacggcaatctcctcagtgtccgccgagagaaggtttagttcataaatgaggtccagcctcatttccgttgcccattccacatcttcgttttcatcagcgatgcggatagcctctttcaacaaattagctttctcacggggatgcaggtttttattctgtgcctgcaacagcagtttttgtatttcaagtgtgtatttcatacgctttcttaattcaggaaatttataaaatcattcattttagcagtcatcaattcactgagcgagtggttgaaaagttccatttcctcactgttcacaggatacttaccctgaaggagtgactgtacatataatatatgtaccacatgctgaaacattttattatctccctgtatttgcagtaaagtacggaccatttcattatccgcattaaatgtcagcgtcggaggtatctgcctggtcgtattgacagtccccaacacagccgctaacggattattggtactcttggtcgtactctctttctcctctgccacaaatatcaccggaatatccgccggagtaaagtgcttcaaccggcagacgcagccaaaacgctttaacaactcgttcgccttcgcctcaaaagcccggaactcttttttggcttctacctccccaaactgttccagtaatctcgaaggggatatttcatccaaagtcagttccggattcaggcgggcatactttttcaacaacgtttcatcaaacgtataagcagcattaaccaccaaccatccttgtgctcctgcaatacggcgtacctgcctgaaatcctccagattcctggtataacagatcacattgtccgccgaacggatactcccgaagctccgtacccccttattcgtctcaaaaggaagataatccataaacaaacgaagcaactcattatcttccgaagcaatcgccttgatgtgaaaatgatgcacgtccagtatcttattaaacatagcccggttgttctgcaccagtccccgcaaataatccttgatagccatacctatctccttgcgggcatccttcagcaaatcattgcttaccagagactcgcgtgaagcggtagacaacaacccatccgcattcaccagacaacggataaagaaagcccactgcggcaacaggttacaatcatcctcgctcaacagcatacgcttcaaatacactttgtgagagttacgcacagaaaactgcgtccggaaaggcaacacataaagcactccctccacccgaccgctttcagtccgtatccgaaaaacatcaagcgcagatgattgaaaaactttcgccccgtaatcaaggagttccttgcgggttgccttcgggtcaagccatacaggcgaaggcgtattcaccaactcttcctcatcctgatgatgcagatagacaggatatggcaacacctctccatagccgaccaatatcttcttaaatgtatcatattcaaaaagatgcatccagtcattcttgggatgcaataccacctgcgaaccgataggacgttcttcggcggatgacgtcagttcatacgtaccgtccaccttaccacaccaacagacagcctgcccgcccattgccgaccggctctccaccttgatctcatccgtcactacaaaacaagacagcaaaccaataccaaaccttccgataaaatcatccgcatcaggcgtatcccgtttcgagctttccccgataacggtaaggaaacgatatacctcctcctctttcagcccgattccattgtcgcggaatatcaccgttttgtcatcattcagaaagacatcaatacgtcctgcataattctcgtcaatattgcgcaaagctgtaatagcatccacacagttctgcaacaactcacggacaaaggtattcggattactataaatatgctctgacaacaaggcaatcattcctttgagattgacttgaaacagattattcccttctttctccatgcctacttactattttctcctccttccggtgatcttaagggccttttcgttaccattttcagcagccttctcgaaccactccattgctatatcatcgttttcttccacaccatttcccgtcaggtaagcgtttcctagttcaaattgagccttatcattattcttttcggcagctttcaacagccattgcacagctgcttccgggtcaggcgtacagccttcgccatacatttgcatcttacccagataatatgcggcaccgatattctcattaccggccgcatccgtaaaccagcggtaagcctccgcataattctgcttcacacccactccgttgtaataacaaagtccggtacgatacatactcgtcacattaccgttatccgcagccagtgtataatatttaaaggcttccgcctcattatcctctacaccgatacccatttcgtaacagatacccagtccttcgttataccattcgtattcggcagccttcttaaagtaagcaaacgccttttccgactcgttcagactatcataatcatacaaataataatcccccatgcgcagcatcgccataggaatctcattcgcaacagccttttcgtaccattccacggctttcttgttatcttccaaacaaggaccgcacccgaagaaataataatctcccattttaaactgggcgtaaccataatcctgttccgctgcccgtgtcatatattccacagccttttgcgggttttcctccacaccgttaccgttctcataagccagccccaattcagtcagacagcgggattcgttcttctctgccccctttccgaaccactcgagtgccttgtcccagtcctcctccgtaccgattccctgtttgtaacaacgtcccagagcaaagattccttcattttcatccgccatggcagcttttgtataccaggcaaatgcctcctccggcttcgcctcacccaatacagctttttccagataaagacctacgcggaacattgcataaggatagccttcctgtgccgctttttcacagagttcaaaagccttctcatagcttctttccactccgttgccattctcgtataagaatgacagttctaccaatgcaaaacatgaacccattccggccgctttctcgtaatattctctcgacttcaccgcatccgtcacaccgctatatccgttagccaagtaaagcgctgcacggcagtatccgtccacattatccagttcagctgctttctcgtaatattccatagctttcacataatccggttcttcagacagaaagccacgttcatacatccaacccaaacgataggccgcatttcccgaacccagttcgagcgccttttccagcaactgttttgcacgactcatgtcttcttccaccagatcaccgttgaaatatacattcgccagtccttcgataccttctatataatcaccttccacacaacgttcgagacacatcagcccacgttccacattcttataatcatcattgtacaagtaaatcaatgccaactcatacgcactatacaactcgcaataaagcattcccttctccagccattctattgctttaggcagatcaagccatgcctcctcctgataattgtatcccaggaagttggcggcagaccatactccggcatgccaggctttctcccaaatttcgaaagccagttctttcggtttacccagttcgggataacggaaatacagagtagcgagatttttcagactatatagattgggaacgatttccaaagacttttcataacaggcagcttcctcggctatcttgccttctcccctgtcgagtgcgtctcccattgccgcatacacatgagcacgcaaacggtcgccttcgggcagttcggcaagcaaatcctgccgtatctgcaacgctttctccttgttgcccgtaaactcttcggcaaaagcgcgataatgtttcccccaaagaatagcttcgggtgaagaaagagccgcaaaacgtcgttctccttcttccttatcctgctcacaataaaaccccatataccgccaataggcaacagtcgcttccgcttcaccccagcccatatcggcagccttctcgtagcaagggaacaaatagctcatatcccgctttccatagcgggcctcggagtactgtgcacctttctgcgcccagcctgctccactgaacacagccacacgttcgcacacccgcatcaccttctcccaccagaactcatattcttcttcgttgagatcgacttcgacattacagtcgaatgcactgaatatcaattcaaagaaaccttccgtcagtttctcatcctcccgggtgtccaacgcatattcgcatacagccaatgcttcccaccagttatcagcatttaataatgaagtagatgtatatttcggaaaccatgccgcagcaggtttcccagaggctttaatcccggcggacaactcctcgaatttctctttcaaagttcccataacagtctctttatcttctttcttgtgttaatagtcaatagaaaaatctcgtaacgagcgccaaggtacaaatattgactgaatgaacaaaaaagagaacccaaaaagataaagagcagataaaaagaaaagggagaaaccatgtggttgacatgacttgtgaaagtaaaatagcttatagtcccaacaattcctgcaatcgttgcacggctgtttcgatctgccagcgatcttccagttcgtcggcattgaaaatatattgcgcctgcgtgtagaaaggagcccgttgttccagtgcccggatgataaacgctttcaattcatcatcctcttttccctgaagtatgggacgctgttgcttggcgatacgcaaccgtctgaacaacacatcgggatgaacatccagaaataccgtcttccccacccggttcataaattccatattatcaaaaaaacaaggcgctcccccccccgtagagattaccacattctcgaactcggccacctcatggagcatattcctctccaattcccggaatccggtttcaccacgttcggtaaacagctctccaacagttttgtgaaaacgctcctcaatataccaatcgagatcaacgaacggtacattcatcttacgggcaaatgccttacccaatgtcgtttttccggcacccatatagccggtaaggaagatacgaaccataaatgactaattttgctcacaaaattagtcattttattaaaatccaagtattaaaaacgaagttatttgaataccctcacccgttcttcgagcggttgaaactctttttcacccggtttagtcacaggaagtccgaacggcatttccgcaatcagatgccaatgtccgggcagattccatgcacgacgcacctcgtcgtcaatcaacggattatagtgttgcagtgacgctccgaaaccgacatcttccagcatgacccatatagccagctgatgcatggccgaagtttgcagcgaccagccggggaagttatcctgataggatgggaaagcctcctgaagtcctttcactaccttttggtcttcaaagaaaagcacagtcccatatccgcaagcgaacgagttatctattttttcttccgtctttacgaaagcctccgcggacacaattttcttcaacgcatctttcacaatctgccacagtttcttgtgtgattcccctaacaaaagtaccacccgcgtagactgcgaattaaatgcagacggcacgtggcgtacggtcatattgacgatacactcaatctcctgatccgggataggcgactgattagtaattgaatagtaagtccggcgatgtttcaaagcttcactaaaagatctttccataatagctcctttctaaatgttatattcttaaactctcttatttttataacaagtagctctgttgacttgttcagttagagaatatatttgtaccttcgcgctgtcaatatacagacatcaattcattgtaaaaaggaaaaatggctaaacagaaattctacgttgtatgggaaggcgtgacgcccggggtttacacatcctggacggactgccagcttcaaatcaaaggatacgaaggcgccaaatacaaatcattcgacacccgcgaagaagcggaacgcgcactggccacctccccttacgcctatatcggaaaaaacgccaagaagaaaagcgagaaagtttcttcggaaacattgcccgcctgcgtgattgacaacagtctggcggtggacgctgcctgcagcggcaaccccggtcctatggaatatcgcggagtccacatagccagccgccaggaagtcttccatttcggtccgacgaaaggaacgaataatatcggcgaattcctcgctatcgtacacggactggctttgctgaaacagaagggattcgatatgcccatttacagtgacagcgtcaatgcaatcagctgggtgcggcaaaagaaatgtaagaccaagcttccgcgtaccgcagaaacagaggaactgtttaaactgatagaacgtgcggagaaatggcttcgggaaaacacatacaccacccgtattctgaaatgggaaaccaaagaatggggagagattccggcagattttggcagaaaataagacaaaaagaccaaacaccccaaaatatatttttatctttgaacccaagatagcatttttgtatccaaacacatcaataaatgtatgaaaaataagcaatttattattttaacggtcgtttgcgtcgttactcttctcccttttatgggattaacggatttccataccaaaggggaaccccgcgaagcaatcgttgcatactccatgattgaaaccggtaactggacgcttcccgtcaacaacggcggggacatcgcctacaagccgcccttgtttcactggtgtattgccgccctttcctctattgccgggaaagtaacggaatacacttcacgtatgccctctgcattggcactgatagctatggtgttaggcggattcttattctacgccaaacgcaggggagcttcagtcgccctccttatgggcttaattaccctgtctaattttgaagtccaccgtgccggtatgaactgccgcgttgacatgatgctgaccgcctttatcgtactcgcgctctaccaactctaccgttggtgtgagaaagggcaaaaaggattcccctggatagccaccttgtttatgggatgtgccacactaaccaaaggtcccgtaggtatcctcctgccttgcatggtcaccggggtctttctgctgatccggggtaccagtttcttcaaagcctttttctcgatggcactggtagccattacgtcctgtatcctgcccgccctttggtacatcgctgcctaccaacagggaggagataatttcatctcactggttatggaggagaatttcggtcgtttcatgggaaaaatgagctacgaatcccatgagaatcctgcttactacaatatcattacagtcgtatccggctatgccccttacacattgttggttctgctttccttattcagccttacatacgggaaaataaccggaaaaccccgcgaatggtggcagaggttcacaacatatatccgcgaaatggacaacacccgcttgttctctttattgagcattgttctcattttcgttttttactgcatcccaaagagcaagcgcagtgtttacctgttacccatttatccgttcatcgcctatttccttgccgaatatatcatgtatctggtccggaaaaactcaaaagcagttaagatatacggcggatttctctccgtcgccgctattcttctccttgtcacatttatagccgtgcggttaggattagtgcccgacagtattttccacggaagacacgccgccgagaatatagccttcatgaacgcgttggcaaatatctcactcaacgcaggccacatcatcgtcatctgcctgccattaattgcagccatctatttcttccggacaatcaggaaaaaagaatcgggaatgaacgtagtgtatgccactcttttcgttacattctcgcttttcatgtcattggacggtgcttaccagcccgccatactgaacaccaaatcggacaaaggaatggcggaagatatccgggaaatagcttcgggcagcaagatctattcttatgtagctgtcgatatgctccgtttctacacggtcaatttctatcacaacgaccagataggattgtttgaaaaggatatgccggccgaaggctatctattggtaggacgacgcgattttgaaggtttcaagcccaaatatgaatccgaatatacttttgaagaagtatatcagagcacgaaaagaggatgtgacatccgtgacattatttacctgtatcgtttcaagagaaaatagccataggatcagcatagaataacagaaaaagaagtaaacccgttacaggtttacttctttttctatcagataacgcggacggcgtttcacctccttatatattttaccgatatattcaccgatcactccgacggcagtcaggatagcgccgccgataaaccagacagaaatgagtagcgaagtccagcctcggattacgtctccgccaataaactccaccaaagcatagataatggccaggaaagaaaccagcataaagataagcccggatgtggtaatcaggcgtaatggtttgacagagaaagaagtgattccgtccagggcgaagttcaacatcttcgtgaacggatatttcgattcaccggcaaaacgttctttgcggtcgtaatagacagaagcggtaggatatccgagcatacacaccatgccccggaggaaaagattacgttcggggaaagacaccaatgccttcagggaacgcttgctcatcagacggaaatccgcatgattgtaaacaatctccccgcccattgtccgcatcagtttgtagaacatctgcgcggtatgtttcttgaagaacgtgtccgttttacgttcccgccgtacaccgaacaccacatcggccccctgattataataatccaccatttccacaatagcattcacatcatcctgcaaatcagcgtcgatagatacagccgcatcataatcgccggccgccacaaaatccaatcccgcccagagagcctgctgatgcccgacattatgcgccagtttcaagcccgccacacacctatgagattcagacaattgctctatcagtttccaggtagtatccttgcttccgtcgtccacatacaaaatctttccttcggccaccttcccttcctgctccattcgggcaagcacatcagatagctgacgagtcgtttctttcaatacttcttcctcattataacaaggaactacaatcacaagtctcacgccgttcatagctttttatgtttaaagacaaaccgaacaaataagaaattcacaggaatcgctatcgcaaacaccggcacaggtgcccatgctttagaaactcccagatagaggaatacattcaacagaatgatatgcaacaaataattaaccagatgcgcccctcccataccaaccaactttttccatgacggagtggttccgaacgtaaaataagaagtcagatagaagttaacaataaaactgattacatatcccgtcgtataggctacattgacgttgataaaagattgcaggaaataataaatcccataatgcaatgccgtagccagcacgccgaccacgccaaaacgtataaactctttcaccaacggctttgttttcataaagcacttacttcttgacggatactttatctaatgtcttgtgttcttttaccagggattccgtactttgcagcatagagaagcaataatccttcaagttccggaaagcctcctcatcagtaccggtggcagcgcggagcttaccttcctccagtttgtacctgaattcctgttggctgtccggcgaatagataaacatattcaccgagtctcttgccccgatcagattatccgccgtaaagaacatacaaggacgttcttcttccaacagattgacaccgaaattgttttgcaggtaacttatgttaagcagccccaacaacgtaggagatacatccacctgcccaccaaaaccgtcgtatacccccggcttgatatctttcccgtaaatcatcagagggatatggttataagactggggcatttcacattcaggtgttcccaccattttgccatgatcgcccagaaaaacgaaaatcgtattgtcaaaccacggctgtttttccgcagcctgcataaactgccggatagaccagtcggcatattctacaatctgttcttcgagcacatcactatgcgggtgaaaatagggcggaatcacataagggggatgattgctgatagacagcaatacgctgaagaacggattccccgtcccggccctttcattcaaaataggaagtgcatactgatacatgaagtcatcctgcacaccgaagctgttcactactttttccgaaggataattctcctgagcgtagatttcgtcgaagccgttcgtgcgaaggaaagcattcatattgtcgtactgcgattcgtgagtcataaagaacaggttacagtatccgttctcctgcaatacggtaggcagtcccgaatagacaggaatcacagaacctttcatggcattccgtttcatgatagccggaaaagaataaagcgtggaataaataccatgattggtatgaataccggaggagtagaaatgactgaaactcaaggattgctgataaaggctgtccagatagggagtcagtttcttatccgatccaaaagtccccattagattagcggacatagactccataaagaccagaactacgttcctgcgattaggcgtaccttcccgttctactttccgtgcgatcggagacaaccggtcaattccttgcctatgcaaatatttctgtacttttgataaagcgtcttcctcagacatcagatgcagagtccggttttctttccggttatcatccagtgtacttgtcagcagattaaagacgggattcactcccaactgattcaggaacgggtcttcacaataatatgcctgacttacttttatcgggttatatcccatacgcccacgaatgccgaacaggcaaagcccgatacaaattgcacctgctaccaacacagctacccggctcaacagacttatctgtggtgcagccttttccgccctacgatagaaataggatgcaagggaagaagctccccaaacaaatgccacgatagacaggagcccgaggaatatcggaaaatagtaagaagactccccaaacatcagaccagctgttgtaccgccatagccgaaccaattataaatagaagaattaatcgttttgaagaaatattcaaaatatggaatattggcagcagcgataacaaaagataccgaataaaaacaactaaaataaaccgttgtagacctaaacagccatttagcggtgtagttacaaagagcggctatccacaaaacagccagagggagcaacaggatataacaagctattacattgtcaaaccagagtccgcggaggaaagcaccggactgcaaaagaacatctccctttatttctgccgggaattgatagtcaatggaacagaacagtgtgaaccggaaaataaagaaaatgaagagagctgccacgtgtatggataacagatataagaggtagcactcaaaacgttttatagagattcctttcattagattcaacttaaaaaagttccattataattattccgttacagttgctgcatatcgtgtaagcgtttgtaatatccgttcagttcaatgagttcctcatgcttgccgcgttccacaatctctccctcatagagcacgcagatttcatccgcattcttaatagtagaaagacggtgagcaatggcaatcgttgtacgcgtcttcatcaaacgctccaacgcttcctgtaccagacgttccgattcggtatccagtgccgaagtagcctcatccagaatcagaatcggcgggttcttcaagatagcacgggcaatgctgatacgctgacgctgaccaccggacaacttaccgccccggtcaccgatattcatattatatccctccggcttctccatgataaaatcgtgtgcattcgcaatcttggcagcttctatcacttgctccattgttgcattttccacaccaaaagcgatgttgttgaagaatgtgtcattaaacaagattgcttcctgattcacgttaccgatcaaactgcgcaaatcggcaatacgaacatcacgtatactggttccgtcgattgtgatatctccttcctgcacatcgtgatagcgcggcagcaaatccaccaacgtcgatttacccgaccccgactgtcctaccagtgcgatcgtctgacctttaggaactgtcaggttcacatgcttcaacacttcccgtttaccgtcataactgaaagtgatatccttaaactcaattttgtcattcagtcccttcaacggtttcggattcgaaatttctttgatcttattctcagctttcagaatcttgtctacacgctccattgaagccagacctttcgggatgttgtatcctgccttcgcaaaatctttcaacggattgattacgctatacaagatcaccatataaaagataaatgtcggagcgtcaatcgatgcgttttgtcccagaatcaatgtaccgccgaaccataacacagctacaatcagaatcgttcctaagaactcactcataggatgcgccatagcctgacgtatggcaaccttatttgtcgcgtcacgaagttcgttgctgcatttggtgaaacggttaatcattttgtcttccgcaataaaagctttgataatgcgcaagccacccaacgtttcttccagttgcgacatcgtatcgctccacttgctctgcgcctccaaagactggcgtttcagttttcgtcctaccacacccatcagccagcccattcccggcaacacaacgatcgtaaagagagtcaactgccagctggtgatgaccagtgtcgcaaaatacagaataatcataatcggactcttcatcaacatatccaacgagctggtaatggagttctccacttcacccacatccccgctcatacgagcgataatatctccttttctctcttccgagaagaatgacatcggcagacgcatcaccttggcatacaccataatacggatatcacgcaccactcctgtacgcaacggaatcattacagccgaagaagcgaaataacaaccggttttaaacaatgtcataatcatcaggaacagtcccaaaaagataagcgccatagtaggtccattatctattatcatctgactgatataataatagaagttattcttagcaacatcggccaaatcaccacttccccattccataaaatgatagaccttatcagccccttccgtcttgaacaggatactcagaataggaatcaaaaaagtgaatgaaaacacattgaatacagcagataaaatattcagcaaaacagcccagccgatatacttcttataaggcgacacaaaacgtcgcatcaattgtagaaattccttcattacttgccattaaataagttactgatgcaaagttactacaaaaaagtgaaatgcggaaagatatagtgatagaattgagttacaagggttttggttga

SEQ ID NO: 3104 - DNA, 447 bp, Unknown
  gut microbiota DNA sequence
tcttgtactacttgtattgtttatcaatatttcaaagaacttgtcgcttccgtttcaaaagcgggtgcaaaggtaagaggtttatttttaactaccaaactttttcggaagttttttttcagtttttctttttatccgtttctcaggctctctatgcgaaagggaaagaataaatagaaagaagaacaagcaaaacaccttttctttgcgaatcggactgcaaagataagaacttttttatttatattccaaaacttttcggaagtttttttgttcttgagtcaagcagtcctgcgctttgtcactaagtcattttcatcaaggctttcttctctcggaaagcgggtgcaaaagtactccctttcaggatacaaaacaaatatatatcactcttttttctgattatttttttataatctgactaacttgctgattgataggctggtt

SEQ ID NO: 3105 - DNA, 2946 bp, Unknown
  gut microbiota DNA sequence
cttcattcagtatgtgccctctctttttaacttaatacagatagtggatcgtcacaaatgaattatattaatgaaatataatattatgagaaacaagttatttgttattggtgttttactatgttctaatattactcatgcacagcagcgaattgctggattgaataaggatatacatgttacaaaggtaggagtaaaaccttatgaaatgaagaacacttctttgaaaaaggcaaccctttcttttatggattgcagcaagtggtatgttcagacggaaaattgtgaggcagctctttaccgaagtaatcaggaaatagtggcagatgaattttctggtaagattgtttataagacaacagcacctaaagcatctgttttcttggggcttaccaagcctatggaattgaattacgtatgggactgtttggatgtgtggacttttggggaccattggttatggggagaaccacattacaatacatcaatgcaggtatatgcatgttttaaaggaaaagacggacaagaacatgaagttaatatggtgcaacagggatatcctaatatggcccataaatattggtttttgaatcatattaaattaaataaaggtaaagatttatatacccattttttagggtttaaattaaaaggacaaaaaacagacacaggtacacaacatactgtatttttcaatagtgtatatgtatataaagaaaaactaaacccgattcaatttaaacctttccctgaacaacttcctttcccctgtagaaaagaaacaattttacctcttcaaaaaggggattatcgtcataaagtatctttggataatagtctgtgtgtttttgattatacagatgaaaaaacaaaactttcctacctattacctaaaaaaaatcttttgggtgacattcaggtatatcatgacggaatgttgaaacagaccattattaagcgtgaaatgcgttggaagaatggtaaagtagctgtcttgaaatctaagaaaatcaagttgaatggggatacgttgttttttgaagcagaaggcaattatcaaaacaaaagagttccctttaaaggttggtatacgattgcgcaaaagtctttggtatttcatttagaagaaatacaagaagtaggtaatgtacgtagtctatcaacgggtgtgatagctgtggataaagagggtattcaaacactgattccattcttgaggtattatggagatgacagacccggcattctttatcaaaacgatttgtttacgtttatgattttcgactggtataagacgcatgcttctgctgtaactgcaggtgctaagagtgcggaagtctttactggaggagaagtggtgtatattcctaaaacggatgggaaacgcaactctctatatgaaacgctgtttattaatgtttctcctgatgtacatgaagtattgcctactgttgacaatcctgcttcaccgatgcgttctatacaagcagatcgtttgtgggctattaacggaggttcagatttgaatggtttgggtcaatttgtaacaggacttcgcagcaaaggggttgagaaggtgactattcgttatcacgaagatttttggcgtgaaggcggagaaagttatacgtttaaactgactcctaacccacaattaggtattgagaatgttcaaaaatacattcaatttgtaaaagacaacgactggcgtgtaggtttgtatagtaattataccgatatggctactgtaaatgaacgttggtcaccagattggatgaaacgtggtccggaaggtgaatgggaagtatcttggtctcgttgctattctccgaaaccacaaattgcatgggaacaacaagcaattttggctccacaaattcagaagttgtttaacacgaaccattcttactgtgatgttcataccgctgtttcgcctatttcacgtgtagattttgaccaccgggtacctgatgccgctatgatgaagggggtgtataaccgatacggaatgctgttaatgaacgaacgtaaagcttacaatggtccggtttattcagaaggaggtcatcactggtggtatgctggtttgttggatggtaactatgcgaatgatgatttgttgaatttgcctatttttccagattttaacttgctaaaaattcatccattggaaatggatgctgctaatacgggacaaggtcatcaatacatttgttatgcgatggcatatggcaatattggtatcttatcggatggtgtagatgctgtgacacgttatgcgtttttacagcccatacaagaagattatgtgatggttccggtaaaggagattgcttacttcaaagacggaaaagcttataatacttcggaagctctcaaaaaagatttgctgaaaactccttgcctgaaaattacttatcagtcgggattggaaacttatgtaaacttcggcaaagaagaatggataatccagataaatgataagaactactctttaccggaatatggattctttacacacatgccacagagcggaaaacaaagttcttccgtttggataaatggaagtcgattggatgaagtttatagtaaaaatctctattatctaaacactcatggtaaacaaatagaaggaaaaatgcgtggtaatggacattaccttttgaagaaggaaaaattttcttgggaattgattccgttggatcagaagagtatgatagaatttgatttgtcacttctgaaatcagactttatccatgcaaaagtggtgggtgtcgataaagaaggtagatatgtgaaagagattccacaaaccaagaaaggtattgttaccgttcaagctgaagaaggagtatataaataccaattaatcccccaattggattaattgctagatcgttgaggaaaatgatttatgatctaaaaggaggttgtcaaaactagaat

SEQ ID NO: 3106 - DNA, 158 bp, Unknown
  gut microbiota DNA sequence
tttcctccctcgtttaaatataataatgtgtatagttttgtattcttcccttcgtagcttcttgtatagaaaaggctgtgttcttcaaccagcctatcaatcagcaagttagtcagattataaaaaaataatcagaaaaaagagtgatatatatttgt

SEQ ID NO: 3107 - DNA, 1699 bp, Unknown
  gut microbiota DNA sequence
agtacgaacacatttaagtttccaaattgattcttctcccagatctcaacagccttatcaactgagaaaatacttactttgatctctggtggtgctgcgaattttaatacatttttctgcatcttgtctttcgccacgttattgtcaattacgacgatcttctgtgccttaaacacttttacccactgtgttactacctgcccgtggatcagtctgtcatccactcttactgctaaactctttgccatatgctttttctcctttcactcttcaacatttcaaaaagtttctttattcgtcgtcttcatcttcatcgtcacttaggaaaccttcggtatcaactctgaaaatcccattcttaccattctctactgtatctaaactaaagtcttttcctgatattccctctcttgcaagtactgcattcactaacattggaagattcattcctccaacaacttccagtggcttctctgtctcctgaatatgacgcattacctgattacaaggagttccgccgaacagatcgaccaagatcatgcttccttctggaaattcattgatcgtttctacaaatgcctctctatatttgtcaatatcatctcctggttctaaggaatatgctgcaatgttctcactctcaccaaacagcatcttcgctgtatcaactaatgaaactgcaaatggcccatggcttaataaaattattcctggcagatctttatttactttctctggcttataacatttcacgttttttctcctttaatgcatggttgtgaacattatttcactataatgttctttcgttctttctagtattattatatatctgttttgttcctatgtcaatacaaaatgaacattttttcatcatattgttcattttcactttttgtcactattatatactgacaaaagaaaaagaggctttggcagaaaccaccacgattgactctacattcgtaaatctttttacgagaaagtttttataaaaaaatagacagcgctctttttcataagaacgctgtctattttttatttacttatttcccataatatattctataagtttatctgaaaattccttcaccactgtatctgcctgatggagatcttgtttgatcgctccttctggtgcatatccaatgcatttcattttggcagatttggctgcctttactcctgcttcggaatcttcgaccacgatacagtttgccgccttctgtccaattgcctcagccgccttttgaaagatttctggatccggctttccgttttcacattcggaaccgcttacaaatgcttcaaagcagtctgtaattccaaacgtattcatatttgtcatgatatcttctttcaatgaagacgatgcaactgccagatgaaatcctttttcctttaatatacggatcagatcaacaacccccggcatcggctttagtccttcctggttgatcaactcttttctggttttaacccactgatctatataatatgaaacttctttatcaagactttcaaattctttcttcatctctgtccacatatattcatgtgtcgtacccaaaaacttatcatgataatgccagtcaacttcaatacctgcttgttttaagatgagatgctttgctttgacattaaaatattctgaatcagcgatcacaccgtccatatcaaaaatcactgctgtaatcat

SEQ ID NO: 3108 - DNA, 1904 bp, Unknown
  gut microbiota DNA sequence
ccaagtcggtaacagatggttcaaaccaaattatcatgctcatgtcgtattcgactggatgaaccatgaaaccggaaagagccgaaagctcaatgacgaagatatggcaaccatgcagaccttggcttccgatattctcctaatggaacgtgggcagtcaaaggctgtcacaggtaaggagcatttggagcgaaacgactttatcattgagaaacagaaagccgaactgcaacgtatagaggaaaccaagcgacacaaggagcaacaggtaagccttgccgagcaggaactcaaacaggtaaaagcagagatacgcaccgacaaactcaaaagtgtagccactgatgcagccacagccatagcaagcggtgtcggttctcttttcggcagcggtaaattgaaagatttggaacaagccaatgagaatttacgtcatgaaattgccaagcgtgacaagggtattgatgaattaaaagccaagatgcaacaaatgcaggaacagcacggcaagcagattcgtaacctacaaggaatacataatcaagagcttgaaaccaaagacaaggaaatatcacgattgaacaccattcttgaaaaagcgttcaactggtttccattactcaaagaaatgttgagaatggaaaaactatgctataccatcggatttaccaaagatatggtaaacagccttttggcaaaaaaagaagctatcagatgcaatggaaaaatctattccgaagaacataaacgaagatttgaaatcaagaacgatattttcaagatagagaagagttcggttgatgaaaacaaattagtgctaactataaacaggcagccgataggtgaatggttcaaagagcaatgggaaaaattaaggcatggtttgcgacaatcagcagaagaaccaagaaaaagtagaggattcagaatgtaatcttgatagtatttgattgtacctcaataaaattgcatatctttgtaagcggattgaggctactctttccaagacatattagaatttagaagaagcgttatgcttatttcttgcgaatgaaaacctgagaaactttcaaacgtgtacaagaatagcatagtggttctcacgctatagcgtgggctgctattgttacatctgtacacaaaggttttctcaggaccttcattcaaagaggtggcattacagttccacgcttcgtgatattataaagtccttgtggcagctggaggtgtataattaaaacagttagttgatatgaaacagaatatatgcgtggtaatatttttattgctttcaaccatatgtaaagcccaaacattcatatacccccaaaacgattctatcctgacagaatataatgatggaaaattttgggcttatttaaacaaaaatgattttgttgtaggtctttcatgctttgaggaaaaagatgattatggaaaatactatcacttggatatttttatcaagaatttaagtgaaaccccaattgtattccaacctgatagcgtacactctaatctactaacaaaaaaagatgatactttaaaacttgaagtatatacaaatgaagaatatcaaaaaaaaataaaacgctcacaagcatgggctatggcattatatggaatctctgccggcattaatgcaggaacagcaggatattcaacatcgtattctacgtcttattcttctaatggttatgcttacactaccataaccaatcattatgacgctaatgcagcataccaagcaaatgtcgcatctaccaatcaaatgcttacattaggacaaatgatggataatgaccgaactatacgtgaacaaggatatttaaaaaccacaactatttatcccgatgaagctattattggctatatgaatattaaaaggaaaaaaggtaagattt

SEQ ID NO: 3109 - DNA, 893 bp, Unknown
  gut microbiota DNA sequence
agataaggaaacaaagaagtatgtattcaagtaccagacaccaaagacaaagaacagtatacggacgattcccatgcaggacagtgtgtataaggctttaaaacgtcagtggattcagttgaaagaaatgcagttgtcagctagtgaatggcaaccattagagggatttgaaaatcttgtgtttgttggaaagaacggaaaaccgattacagaacacacctttcaagtgacgttagactggatagaaaaatctatcaataaggaacgaaaaaagcaggcagagaaaaacaagacagtgtttataccgattccgcatttttatccacatgcacttcgtcatacttttgcaacgcgttgttttgaagccgggattgacgcaaaggtagtacaaggattcctcggacattattccatagcaatcacactggatttgtatacgcacgtcacagatgataaagcaaaatcggaaatggataaattacagaatttgtataaggaaatcatataatcagaacaagaataagaaagagaatagaaaaggtgcaacatttctttagaaaattatttgaccgagatttgaccgaagcggattttgcaacaagtacagaacagcgaaaacccgctaaccacaagggctaacgggcttcgttgttttatagttatctaaaggaatgagagtaaagtgttgcaccggattcccggtgtgctactttatgagggggagatagttgattttgtctctctcaactatctgagtttattataaaaaacaaatatgtctaaagtatgttaaattccttaaagaaatcggaaaaatcttaagaagaacttaagaggttataaataatctgaaaacgctacattccaagtaaaagcattggatcccgatgcag

SEQ ID NO: 3110 - DNA, 1563 bp, Unknown
  gut microbiota DNA sequence
ataagaaaaaagctactaaataataattgttgatatggcaaaaaaaacagttgcagctaaaaagagaaatgtgaaagtagacgctaatggacagttgcatgttcattcatctttcaacaatattattgtttctcttgcaaatagtgaagggcagattatctcttggtcatctgctggtaaaatgggatttagaggttcaaagaagaacactccttatgcagcccagatggctgcccaagattgtgctaaagttgcattcgatcttggcctgagaaaggtaaaagcatatgtgaagggtccaggtaacggacgtgagtctgctattagaactatccacggagctggtatcgaagttactgaaattattgacgtaactccgcttccacataacggttgtcgtcctccgaaaagacgtagagtttaatttacctttaacttacacaatgatcttgattttgtttttggattgcattaatttctctctgtaatcgcggctgcaacaaattaagttcatgaataaacaattaaatatttaaaagaaatggctagatatactggaccaaaatcaagaatcgcccgtaaattcggtgaaggaatctttggagctgataaagttttgtcaaagaagaactatcctcccggacaacatggaaattctagaaaaagaaaaacttctgaatatggtgtgcaacttcgtgaaaagcagaaagcaaaatacacctatggagttttagaaaaacaattccgcaatttgtttgaaaaagcagctactgctaaaggtattactggtgaggtgcttcttcaattgttggaaggtcgccttgacaacgtagtattccgtttgggtattgcccctacacgtgctgctgctcgtcagttggttggtcataagcacattactgttgatggtgaagtggtaaacattccttcatacgcagtaaaaccaggacaattgattggtgttcgtgaaagatctaaatctttggaagtaattgctaattctctcgcaggattcaatcatagcaagtatgcttggttggaatgggatgaagcttcaaaggttggtaaaatgctgcatattcctgaaagagcagacattcctgagaacattaaagaacatttgatcgttgaattgtattctaaataataattaatttcatggcgatattagcatttcaaaaacctgataaagtattaatgttggaggcggactccagattcggtaaattcgaattccgtccgttggaaccgggttttggtattactgtaggtaatgcattacgccgtatccttctttcttcattagagggttttgctatcactactatcagaatagatggtgtggagcatgaattttctagtgtacctggagtaaaagaggatgttaccaacattatcttgaatctgaaacaagtgagattcaagcaagtagttgaagagttcgagagcgaaaaagtgagcatcactgtcgagaattccagtgaatttaaagcaggtgacataggtaagtatttgactggatttgaagtgttaaatccggaattagttatttgtcatttagat

SEQ ID NO: 3111 - DNA, 330 bp, Unknown
  gut microbiota DNA sequence
gaaccgttgctgcagcaatgcttgcggctaccggtgtggcccagcttgcatcggccaaagcagaacgggacagaattaaaaacatgtccctgaaaaacactaccggcagcaagaccgccacggctgaacgtgttgtttccggttcttccggtggtggatattcggaaggtggttacactggtcccggtgggcgttatgaagtggccggcgttgttcataagggagaatatgtggtaccacagccggaaatgaataatcctaaagtaatcgacgctgttagcactatcgaagcgatcaggcggcagcgtaccaatgcgaacccgttgccac

SEQ ID NO: 3112 - DNA, 179 bp, Unknown
  gut microbiota DNA sequence
acatcctgtggccgctgactgcggtatttaagaccttccggtgacaggagcttttcacgttccctttccttgatttttctcaggcggtgattcacctgtactatcctttctgaccggcttctgtgacaccggcatcttaacgggcaggcgttacagttacatgccctgtatcttgatat

SEQ ID NO: 3113 - DNA, 495 bp, Unknown
  gut microbiota DNA sequence
ggaattggtagacgcgcacgtttcaggtgcgtgtgtcgagaggcatgcaggttcgagtcctgttctgggcaccaatctttcagattactactggatgaagaaatttagtttgcggaaatagctcagttggtagagcataaccttgccaaggttagggtcgcgagttcgagtctcgttttccgctcttgtttctttgaaatgatggaactaagttttgcccaggtggcggaattggtagacgcgcacgtttcaggtgcgtgtgtcgagaggcatgcaggttcgagtcctgttctgggcacagagattatacttttagaattctggagaggtggcggaattggtagacgcgctactttgagggggtagtgacagttatgtcgtgggagttcgagtctccttctcttcacagttcatgaaaggttatttgcggaaatagctcagttggtagagcataaccttgccaaggttagggtcgcgagttcgagtctcgttttc

SEQ ID NO: 3114 - DNA, 20850 bp, Unknown
  gut microbiota DNA sequence
caaatagaacaaggttgtcagtcgataagattgacaaccttttttttgtattatattggaagtttaccggactattttatcgatagattgaatagaaaagcgtaattttgcaattgaaaaaatcagtgtacttcccccaaaaagagtgtcattgattcacgcaggcctataattaatttaataatagcgatatgttaacacaaatcattaatgcacgcatcctgacgcctcaaggttggctgaaagatggatcagtgcttattcgcgacaacaaaattctggaagtaaccaattgtgaccttgcaattattggagctaaacttatcgacgccaaaggaatgtatatcgttccgggaggagtggaaatccacgttcatggcggcggtggaagagacttcatggaaggcacggaagaagctttccgagtagctgtcaaagctcacatgcagcatggtacgaccagtattttccccactctttcttcttctaccattcctatgattcgtgcagccgcagagactaccgagaagatgatggcggaaccggacagccctgtattaggacttcatctggaaggacattatttcaatatggctatggcaggcggacagattcccgaaaatatcaaaaaccccgatccggaagaatatatcccgttactggaggaaactcgttgtatcaagcgttgggatgctgcgccggagcttccgggagccatgcaattcggtaaatacatcacggcgaaaggagtgttggcttccgtaggacatacgcaggcggagtttgaggacatacagactgcctatgaagccggatatacccatgctactcatttctataatgcaatgccgggattccataaacggaaagaatataaatacgaaggtacggtagaaagtatttacctgattgacgacatgacggtcgaagtggtggctgacggtattcatgtaccacctactattctgcgtcttgtttataagataaaaggagtggagcgtacctgcctgataacggatgcactggcttgtgcggccagtgacagccagactgcttttgacccgcgcgtgattattgaagacggagtatgcaagctggccgaccgttctgctttggcaggaagtgtggctactatggaccgcttgattcgtaccatggtgcagaaagcagaaatacctttggcggatgtgatacgcatggtatccgaaacgcctgcccgcataatgggagtacttgaccgcaaaggaacgcttgaacgtggtaaggatgccgatattattgccctcgacagagacttgaatgtgagagccgtatgggcaatggggcaattagtggaaggtaccaataaactgttttaaatctaataaataaagaagactatgttaactcagataattaacggtagaatacttaccccgcaaggctggctgaaagacggttcggtattgatttgtgacggaaaaatattagaggtgaccaacagtgacctggcagttatcggtgcaacggttattgacgcccggggaatgacaatcgtaccgggatttgtcagtatgcacgcgcacggaggcggcggacatgattttaccgaagctacggaagaagcattccgcatggcaactaccgcgcatttgaagcatggcgccaccagtatgtttcctactttgtcatccacatcgtttgaaaaactttatcaggctgtcgatgtgtgtgagggattgatgcaggaaccggattctccaattctcggtctgcatattgagggaccttatttgaatccgaaaatggcaggaagccagtatgaaggttttctgaaaactcctgatgagaatgaatatattccgttattggagcatactacttgtatcaagcgttgggatatcagcccggaattacgtggagcgcatgatttcgccaaatatacccgttcaaagggaataatgacggcagttacacatacagaagccgaatatgatgagattaaagcggcgtatgcggtgggattctcacatgctgctcatttttacaatgcaatgccgggtttccacaaacgccgtgaatataaatatgaagggacggtggagagtgtatatctgacagacggaatgacggtggaagttattgcggacggcattcatttgcctgccactattctgaaactggtttataaactgaaaggagtggagaatacgtgtctggtgactgatgcgctggcttacgctgcttacgaaggacatgaaccgattgacccgcgttatattattgaagatggagtgtgtaaaatggcagaccattccgcgctggccggtagtttggctacaatggatgtgttggtgcgtacaatggtaaaaaaagcaaatattcctttggaggatgcagtgcgcatggcttccgagactcccgcccgtttgattggagttagtgaccggaaaggtgcattggctaaagggttggatgcagatattgtgattctcgataaggagttgaatgtacgttgtgtgtggtcaatgggaaagattgttccgggtactgatgttcttctgcataaataataattgccggatgagcgatgtttgatagataacatccggtgttttaatgaaaataaaagtccgaatctgaggtttgcctgcaaagcaaatcagattcggactttctttataaagaaaagtcgcatacaattaagtgtttcttctttatggattgtattatatataaacagataattgtactatgaaagtaaagcatttagttgtagcttttctgtgtatgctgggatgttgtgcgtgtagcagtccgaaaacagaagtaaaatcaccggacggtcacatcaagatgacgttgacggtagatgagaatggtactccgttttataatgtgtcggtaaatgattcattgctgatagaaaattcaaaaatgggttttgtggagggaaacggtgttattctgggaggaggcttccggatagagaaaaccacattcgacagcaaagatgaaacatggacacagccgtggggagaaaataaaaccaaccggaaccattataatgaaatggctgtcaatctgattaatgaggatcaggtgcagttgacccttcgtttccgggttttcaatgacggagtagggttccgttatgaatataatgttcccaatgtggattctctgatgataactgatgaactgactactttccacttccgtcaggacggtacctcatggtcgattcctgcgagtgccgaaacttatgaattgctttataagcagcagcctatttccgaagtggagacagccaatactccttttacctttaagacggcggatggtgtttacggaagtatccatgaagcggcattgtatgatttctccgaaatgacgctgaaacaaatcggagattacactttgaaggcggaacttactccttggccggacggtatcaaggtacgcaaaagcaaccattttacaacttcctggcgtactatccagattgctccggaagctgtcggattaatcaattcttccctgatcctgaatgacccttgtgtgttggaaactactgattggattcgtcctttgaaatatatcggtgtatggtgggggatgcatctgggtgtagagacttggaaaatggatgaacgccacggtgctaccactgtcaatgccaaaaaatatatcgacttcgctgctgccaataatatagaagcggtattgtttgaaggctggaatgaaggttgggaaagttggggcggtatgcaaaattttgattttacgaaaccttacgctgactttgacatagatgaaatagtacgttatgccaaggaaaaaggaatcgaaatcattggacaccatgaaacaggaggaaatatcccgaactatgaacggcaaatggatcatgcaatgcaatggtataccgaccacagcatccacatcctgaaaacaggttatgcaggagctttcccgaacgggctttcacatcatggacaatatggagtcaaccattatcagaaggtagtggaaacagctgcggagcatagaatgacattggatgcacacgaaccgattaaggataccggtatccgccgtacatggcctaacatgatgacgcgcgaaggagccagaggtatggaatggaatgcatggagtgaaggaaatccgccgtctcatcatgtaatgttgccgtttacccgcttgctgtccggtccaatggactacactccgggaacttttgatattttgttccagcaaaccaaagactctccccgtcgtcggaaatggaatgaccaagataaggggaacagccgtgtcaacacaacattggcgaagcagattgccaattgggtgattctatattctcccttgcaaatggcttctgatatgattgagcattatgaaggacatcctgctttccggttcttccgcgatttcgacccggattgtgacgaatccaaggcattggcaggagaaccgggagagtttgtagctgttgtacgtaaagcgaaaaataattatttcttcggagcagctaccaatgaggctccccgtacactggaaataaaactggacttcctgaaaccgggcaaacaatataaagctgttatctatgccgacggtgagaaggcagactggaaaacgaatccggcagattatcagattacggaacaaactgtcacagctgaaaatacgctgactgtacgtatggctgccggaggaggacaggctatttcgttcatacaactttaagaaaaaataggttaagatttaatagaggtttattgtgttagggataggtttggttttaagttaaaagattgttgaaagatgatagattaaggaaataaagttggttaggttagaaaaaacggtgaacaagcacaggggtttgttcaccgtttttatttatcttgtcttttgtatacgaaaaaaatcttatccttttgcttcctgatacatgaaacgtttgattgatttcttcgctgtcttttcaaattcctcgaaatgaattttaatcttgctgatctggcagtagttaggcaattgttgattcagttcgacacggttgacttccatagctttctggatatcgttttgctgcaatccgtgagcaaatgcatcgtcaaaatccggatagataagcgccaccagtttgtcgtgttgcaatacgattaatgattccgccacatacggcatattattcagtttgctttctatctcttccggatagatattctgtccgctggaagtgagaagcatattcttgctacgtccgcgaacagttacataaccttcttcatccataacacccagatctcctgtatgcaaccacccgtttacatcaatgatttgtgcggtagcttccggattcttataatatccgagcatcatattcgctcccctgcaaacaatctctccggcatgagttttaggatccggggaatcaatgcggacttccattcgggtggtggcctttccgcaggaagcaagtttcaatgtatcccaacggctggagcagataatcggaccacattctgtcatgccgtaagcaatggtgtaggggaaacctatctttttgagaaaagcttctacttcggcattgaaaggagcgccgccgataatgatttcgtcgaaattacctccaaagatttccatagctgcctggcgggccaacgatttgattttgtcattgacgataggtactttgagcaataactttccgattttgctatccactttagggaggatatctttcttgataatcttttctacaatcaaaggtacgcaagagataactctgggcttaatctccgagaaagattgtgagatgattttcggagacggcatacgtgtcaggaaatagatatgcgcacctgcggagaagccatataagaaatcgtataccataccgaaaacgtgtcccataggaagcatggaaacgatatggtcgcccggtttgacgggaagcatttcaaaacaataggccacattcgaccagatactgcgataggggagcatgacaccttttgaatagcctgtggttcctgaagtatagttgataatagccagttcctcgggcctgtctttccggtaacagatatgctccgggcggaaattcttcgggtaacgttgaccgtatatcgcattccggtgttcgaaagcatacgtcagtttttcattgcgtgataccaatgatgagaaatcggtgagtgacgcgattccttccaacaggggcatggcgtcttcattcaggttttcccatgcctggtcgccgacaaaaagcagtttggcttcggagtggttgacaatattatggatattatccgctttaaattcatggagaataggaacaattacggctccgtaagtgatagtagctagaaaagtgacagcccaatgggcactgttacgtccgcagactgctatcttgtctcccggctgaattccggcactttctaaaacaatgtggaatttagctattttacgagccacatctttatattggagggtaattcctttgtagtcagtcaaagagtctttatcccagttcttgataatgctttgttcaatatagtcgatgaactgatgttcttgttccattcgtttttgcacatttagtttaaaactgcgcaaaattaatacttcattaatgtaaaccgaattttacaattaagttttacggttaattaacgggggatgtttgaacatatttcgttccccgccttattcggattcgttcacttcctcttttgatttttcggagataaggagcaacttgtctcctacatgaagtttcagtgttccgttaggaattaaaaactcatctccgcgtttcactatcataaccaatgttcctttgggaagattcatatccttcaaggtatctgcttcttccagcatttccgtggtaatggtcatgtcgctaaggtcggagtctatttcttccgggagctccactccaaagtcattccctgttttctccagtggtttggagaggttcagcatgcgggcaacgaaagaaatcgttgttccctgcacaaccaacgagacaatggtaatgaagaatacgatattaaagatgatattcgaaccttccacgcctgcaactaccggataggtggcaaagatgataggtacggcaccgcgtagtcctacccatgatacgaacaaccgtgatttcatggtaatcttccggaaagggagcaggcagaggaacacgcttaacggacgcccgatgagaatcataaagacaccgatcaacaaggctactactgctacttccagcatttcgtgcggattgacgagaagtccgaggcaaaggaacatgatgatttggaacagccaggtcaatccgtccataaatgtgtagatgtccttgcggtgcatgattttattgtttcctaccatgatacctgcgatgtatacggcaaggtagccgttacctttcagcaagtcggtgatagaaaaggtgaagaatacaaaagccagcaataatatcggatacaatgcctggttgtcaatattgagtttgttcagcatacggatagccagctttccgagtacatatccggcacctgcacctaccataaactgaatgacaaatgaaccgacaatagcaccgactcccatacctgccgattggataaactgtatcagcacaatggtcagcatatacgccatagggtcattactaccactttccaattccaacatgggacggaggttatgtttcagattcattttctgcgaacgcaggatagcgaatacggaggccgagtcggtagacgacatagtagctgccaataacaatgaagtcgtgataggcagataaatatttgtccaactcatgccggatagccaccagataaacaatccggtgaaaagggcagtgagtaaaactccgacggtagaaagcacgatacctggtcctaaaatgggtttgatttctttgaacttcgtatccatacctcccgaaaacaagatgatgcttaatgcaaccataccaatgaattgtgcatctttggcgtcatggaactggagtccgagcccgtcacttccgaatagcattcctactacaaggaatagtaataaagtgggcactccgaagcggtatccggtttttccaacaacaatgctgacgaaaagtaagatagaaccaataagtaaggtgttttctgctgtaaatatcataggcaatatattattaagttataaaattgtcgtattcgttctcaccgtgcgaagttacacattattaacaacaaattaaagggctttttggatgtatttttgtgaaaaaaggtagttaaattgtctaaaaagattaattttgcactcaattaatctacatcatacttatggattcaaataatcttactcctttaaggaaagggatagtgggagtacaattcctgtttgtagcctttggagctacggttcttgtaccgttattggtcgggctcgacccttccactgctttatttaccaccgggatcggtactcttatctttcacgctgtcactcgtgggaaggttcctattttcttgggaagtagttttgcttttattgctcctatcataaaagcgacggaactttacggattacccggcactttatcgggcatggtaggggttgcgcttgtttattttgtaatgagtgcgcttgtcaagtggcaggggataagggtaattgagaaattgtttcctccggttgtcataggtccggtcattattctgattggactgtctctggcgggaaccggtgtgaatatggcaaaagaaaactgggtgctggccttgttgtcgttggttactgcggttattgtttcaatgaaagcgaaaggacttttaaaactgatacctatcttttgtgggattatagtaggttatctggccgcatggcttttctatgatttagatttatccggtgtcagagatgcggcatggattggtttgcctcaatttgttttccctaagttttcgtgggaaccggtgctgtttatgattccggtagcgattgctccggtgatagagcatattggtgatgtatatgtggtcaacactgttgccggaaaagattttgtgaaagaccccggtctgcatcgtactttattgggagacggtctggcttgtttttttgccggactggtaggcggccctcctgtaactacttattccgaagtaacgggtgccatgtctctgacgaagatcactaatccgcaggtaatccggattgccgcgttttctgctatcttattttctgttataggtaagatcagtgcattgttgaaatcaattccgagtgcagtgttgggtggaattatgcttttgctcttcggtacaatagcttgtgcgggtatagccaatctggtaaataattgtattgacttgagtcgtacaaggaatattatcatcgtatctttaacattgactgtcggtatcggtggagctgtttttacctggggggaattttctttatccggtatcggactggcagctttggtaggcgtactccttaatttgattttgccgagaaatgactgaccggaaagaataagttgattctactataaatttcaggcgcggacgatacaaaaacattgcattgtccgcgcctttatgtaagattcaggttctattagttatgacagaaatttcataatatcttcatctaccgaactgataccaccgattccgaattggtctatcaacacattttttacgttcggagaaaggaaagcggggagggtaggacccagatgaatgtttttcactcccaaagctaataaggccagcaatacgataacggctttctgttcataccaagcaatgttatatacaataggcaacttgtttacatcatccaaaccgaagatttctttcagtttcagggcaatgacggctagtgaataactgtcgttacactgtcctgcatccagtacacggggaataccgttgatatcacctaaagacaacttgttgtatctgtattttgcacatccggctgtcaggataaccgtatcgttcggaagttttcgggcaaactctgtgtaatattcacgactcttcatacgtccgtcgcatcctgccatgacaaagaacttacgaatcgcaccgctctttacagcttctactactttgtctgccaaagccgtcacttgcgcatgggcaaacccgccgataagagtaccgttttctattgctaccggtggctggcattgcttggcgtgggcaatcagtgcagagaaatcttttggttttccgtccttacgttccgggatataatgtgctccttccagtccgcaagcgccggtgacatagatacgatccttgtagctggcgttggaacgtggaggaacaatgcagttgcttgtaaacagaatcggcccgttgaagctttcaaactcctccttttgtttccaccaggcattcccgtagtttcctgccagatgtttgtatttctttagttggggatagtaatgggccggaagcatttcgctgtgagtatagatgtctattcccgtaccttccgtttgttccagcagttcttcgaggtctttcaggtcatgcccgctgataaggatacccggattgttgcgtacaccgatattgacttcggtaatttcgggattgccgtaactgcttgtattggcagtatccagttgtgccatggcagacaccccatgttgacctgtctccagtgtaagttgaaccaattcttccatagttatatcattgcgggtcagttcagctaatgcatgttgcatgaaggcgaagatttccggtgactggtaacccaggttatgtgcgtgctctacataggctgccattcctttcagtccgtagtgcaccagttcttttaacgaacggatgtcttcgtctggtgtgcgaagcacccccactgttttagccttttcttcaaattcatcttcattgccgttccaaagacattcgtcgggagcgtctttgatagaaaccttaccgcccagttcttttttcaagcgtagtccttcctttattttcccaataatggctgctttgtcaaagttagcattggtaatagtgataaagagagaatcatagataaatttgtccgcttcttcggaggaatgtccttctctacgcaggtgttcgttgtacacggcaattccacgtattacaaagagtaacaggtcttgcaggttagccacttcggatgttttaccgcatactccttttaaggtacaacctgtacccattgcggtttcttgacattgataacagaacatactcataacatttacgttttaattagtcttcttgattaatgaacgcaaatgtagcgcaaaggttgcgggcagttctgtaactaatgttacaacaatgaatatttttttgtggataccggcaaactctattggataagccggacaagctcttctttttgaaggatagtgatctgtttccggtcggcagtgagtaatccgtcttcctgcatgtgtgccaattcgcgtgccaacgaaggacgggatactccgaaataatcacttaattcctgttgcgatcggtcgagggtgatatgtaactgttgttgctgcttatataggcgaagtaaataagaagcaatcttctgcctgatagtcttgaaagacatgaaaaagagcttgtcggataaagtccgtgcgtagttggcagaaaggttcatataattttcgagaaactgctcgttcttgcggaacaattccagaacacttgttttaggaatttctataacctctgtcggctcgttggctgtcacctccaccggataacgattttcttcgccaaacagaaaaagcggggcaatcgctctgggggcggcaatatcttctacctttattaatcttccggaatagtctatcatttctccgcgaacactgcctttggtcagaatgacgaggcggttgcatacatccccctgccgtgccagaatttcccctttcttataagaacgggtgtggaaacttatttcttccagattggcggatagtttttccggagttatcccccggaataacggattattgataagtacgggtatcataggctactctgttatttgaattttaatatgaacttagtctctttatcatccggaatcaatgttaggctaccacccgaaagcctcataatctggcgggagatgcttagtccgattccgcttcctctttctttggtcgtaaagaaagggatgaatatatgttccgcaatttcaggagggatagcagggccattgttttttatctcaatcagtacttcttccgcgtcgttgcaatgagcctgtatcgcaatgcgtccgccgggctgattgccgattgcctgcactgcgtttttcagaagattgataacgacttgtgaaatgagattctcgtctgcatggaggatcaggtcggcgggaataacctctgtatggaaagtaatatgattacacggattctggtgccgggtcagttcgaccattcgttcgatgaatgctttcaaataaaacaaagaaggctccggagtcgggatacgtgtgaattttcggtaagattcgacaaaagaaagcaagcctttgccggtggtactgatagtctgcaagccatggctgatttcttcgtctttatctttcaccatggacaaaagtgtatcacttaacgaggtgataggagtgacggagttcataatttcatgggtgagtacacgagttaaccgaatccatgaatcgatctctttttcatccagttcgatgttgatatcattcagagccaggatacgcaaatgctctttatgaacattaatttccgaaacacgtatggatagattgactgttccccgttcgttatgaaacatgacttgtagtttatcccccgggcggcagttttccattttttccatgagtgtagcgtctactttacttaactggcggatatgtgtgaatatgttgagtcccagaagccggagtgcttctttattcttctgatatacagctccattgtcattgagcactaataatcccgtactcacgaagtcgagtatcaattcgtaatacttctcttgttgggctgtttctgcttttacattgtataaaatgtgtcccacccggttgagtgcctgattgatctgcctgctttccggagtaccgtattcctcagggaagtgaaaggaattatcattattttccaatgcatcaatcataaaaagtacctgtttgacgtgggtacggtaaagtcggatttgccataatatgcataggattaaaaggcaaatacagactccaaaccatgtataagattgaaggataccgaaacggacggtgactgtacaaacgagtactgtcaatacgactctgaaccagtactgccgtgttatatattgaagataccggttcataatccgaattttttcatcttgttataaagtgtctgccgggtaattcctaactgggtggctactgccgacaaatttccggcacaagcctccaatgctttccgtatcatttgtttctccatatcttctaaagtggagatgtttctttccggagattctattttccgggaagataattgaaggatctcagcaggaatcagcggctcatcgttaatgatgacaactttctcaataacgtgctccagctcacggatatttccgtaccaaggatgtattgacagtttttcttttgccgcagaactgaatttcatcggctctttgtcgtattgcttgcagaagcggaccatgaacctttcggcaagaggaataatatcttctttccgttcccggagcgaaggtatctctatatggattgtattgatacgatagagcaaatcttctcggaattctccgttatctaccatttcttgcaaattacggttggtggcacaaatcaggcggatgtcgatcggcatcgggctattgcttcccactcgcacgatgcttcttcgttgaatggcagtcagcagtttggcttgcagatgatagggcaagtttcctatctcgtcaaggaataacgtacttttatctgcggcttcgaacttacctgtccggtcggtatgcgcatctgtgaaagaacctttcacatggccgaaaagttcactttcgaatagtgactcagtgatagctcccatatctacggcaatcatttccttttgtcgtcgattggaaagcgcatggatttctcgtgccagaatttctttccctgttccgttttcacctgtaatcaggatgttggcatctgtaacggcaaccttttcaatcaacattcggagttgttgcatggctttactttctccccaatatatcggctggacaccggcggattcctttcttgctcctccttttttttcgtttctcacagactgtgcggcggtttgtaaagtctctaccagtttttggttgttccagggtttcacgatgaaatccgtcgctccttccttgattccccggatagcgagttcaatgtcggcgtatgcagtaaagagtacgatgggaagttccggacgtactttctttatctcgtgcaaccagaacaaaccttcattaccggtattgattcccgaagtgaagttcatatccaacaatatcacttccggcatttcttcctgcatcacagtgatgagggtgacaggtgaagaaagtgtgacgacctttgaaaaataacttttcagcaagatctctacggcagtcagtactcctttgttgtcgtctacaatgatgattgttcccgatttgctcatattcgattaagtttatcaggtacaaacttacgaaaaaatctctggaaaagccgaatgagaagggacaaatagtaattcctttttatacccatgaaggaagtggcctgtccgacacagaaaatcatctgaaagaagcatgtagcggagctactatagcccataccatttacggtgtgggcatttgacctaaattatcccaaaatgagctagggcattataaatgccgtcctcgtccacatcgtctgtaacatagtcggcatagttcttgatcaaatccgatgcgccgcccatcgcaataccggttcctgccgcacggagcatgggtatatcgttgccaccgtctccgaatgccatgctttcatccaaagaaaaacctaaataatctgccatatcagccattcctgaagccttgttcgtatcggcaacattcacatctgcgaaatacggattccaacgcgaaacagtcaagttgggaagttgcgtcataatttccttctctacatcttcaccacaataaatgcaaagttggcgacacttacactcattaaattccttgtctatgtccacaaccagaggaatcggatgattggtaagttcggaaagtgctataacggtatcatttacataattgacaaatattcctttatctacttccaatgccaaagggaaaccatatttttctgcaagattacggactattctgaaatcttcatgactgatttggcgggaagtgatttcagtgccgtcacggagcaggcaatgggaaccgttcagtgagacgaccgcatcatacgggatggcgtccagttcgccaaggtctgtcgccactctgcctgttgctataataatcttaatgccattgttatgtacctgatttagggcatcaatcgttgtttgtggtattttatgtgttttgaaactgattagagttccgtccacatcaagaaaaatcgctttagtcttcattttacgtcctttctttttttattgtgatactacagatttggcagtcaagaatcaaaatggtttgactgcgttacctcgattttagcctttctttcaaacttcctttgttttaggaggtttgaaaaattttccaaatctacgaaaaatattttatagccattggaactttaatccgaaagataagctcaaataatcacgggggcggagataactgttttgtacggcactaaccagataaaggtcacaagtacttatttcatagaaaaaagtaaccgacttagctaaaaatctgcgttgcgggtcaatgtcataagtcagtcgttgtcccatataaatatgaatacgtactttgctcgaaaatccataataccctttaggataacggtccggttcgtttacccagaactgatctccgaagacagtgttcaggtagagtccgcaggcaagaggttccgtcgagaatccttttcctatattaatactccagggcatatagttctgtttcagtgtcattgtcacttttgtctttttcgacgaatatttcgggatgaatccgagcaatatatctgtttcccattgattccgttttccgtaatcccaccctgtaccgaaggagagcaatcccatgtttccggcatattggattttagcatgagtcgggataatccgttcccagtttttgcggaagcgatgtacccgattgtcataaccggttctctttacagctttgggtataacgggtagcacagtgtctgccttgatgatagtacacaaagagtctcctgtatgaaaggcgataattgagtcagcttttactgcaaaatataatgaatcgcgcttatatgtattgataactgtatctgttttacaagtagctgaacttggacaggtaaagaataacaggataattatcagtcctgcccgtccgatgtatttaatatttaaccagttcatattcatatttctccggggttatggtaaataccaggtaagtacgcttgtccatgctgtcactggtaacatagtgtatgccgtcatcaaaaatcacatcatcccgatagtgatgagtatgggcggcagtgcaaaactgaattccgggatattgtttgacataatgctggaacatttttactacattgtcattgaatacgtctgtatacggtcgtgcatgcatacttatgactgttttgttaaattcatctgtcctgtttgtcagttcattttccataaaggtgaaatccggtacaggttctgagtaatcatattccaatgcattcgtattgagacaaacgaatttcacatcaccggcaataaaggagaagttggtaggaccgaatatcgctttgtacgtttctgcccccgtacccagacaatcatggtttcctatgagggttacatagggaacactcaatccgttcataatatcccgttgccaaagaaattctttagtaactccgaagtcactcatatctccgccatgaataacgaagtcgatatcatttctcttattgattgcttttacgaaatcctccgtttcatcgtaccaccgttgtgagtcgcccatagtgacaaagcggattgtctttttacctttacagtcagcttctatttgttcaatgttatgagcgtttacatctgtctctccactgatacgcacatcatagggatgatagtcgatcataccacacccggtcagaagcagacaggacagaagagtgaataaattcttgtttaacataaataaaatatttagttattgaaaacttgatgcgaagatagagttttcaaatgagataacgatgattacttatgataaataggaaaaaaagaacaataaagaggcggaaatatctactttcgattctttatgagaaagaactgaactattgatctttgtctaataattagacatcactgtctaattattagacaaaaactatctgatgttgaatagtataactggttgataatgagtgaaaagatgactttggcatactttctgtttttcaaattgaagatataacaaaataaattaatgatgagacacttttattatacgattcaaacgttgctccatgaacgaggcgtgaatattatcaagattatctcaatgacattggggatatttgttggtatcttattgttttcctgtgttgctttccagttgagttactataatttttgtcctcagtcggagcagttatatgtcacatatatggatggaccttttacttatggtcctttttcagcggctatgcgtgagaacttcccgaaagaagtggaggatgccaccatattgagggacatgggaacaaatgttttttataatggaaatgttcgcctaacggagtctacgatatatgctgacgaacatttgttttccacattgggtttaaaactgttaatcggtaaggcagaagaactaacccgtcctgatgttttattcatatcccgttcgttggcggaaaaaataagagaagggaacagtttggaaagtgttataggcaagactttatccgttgaccgcaaagagccgatgagcatacgtggtgtctttgaagatatgggtgaaaacgcagatatacattttgatgtagtggtaccgatgagcaagttgtggaatctggctcgtgggggctggggatatgatatcagttatatgtcgattattcgttttcgcgatcctgctaaagatataaaggcggtggaagcacgaatacctgatatgcttaagaaatacatggctgactcctcgaataaaaagaaatctcatcgtttttctttccgtcctttattagaatatcatacggcagatccgacagtacggcttatgatattaatgatgtccgtgctgggtattgcaatcttgttgattgcagcttttgattatgtgctcattgccgtttcatctttagccaggagggcaaagtctatcggagtacacaaatgttgtggtgcaacagataacagtatttttagaatgtttctgacagagacagctcttgttcttttcatttcagtattgctgacgatattgctcatttttcagtttcgggagtttgtggaagaaattgccggtatacgtttaagttcactttttacgtggcagacactttgggtaccgttgaccgtacttttggttgtttttatcttggcgggcgccataccggcaagcatattcgcatcaattcctgtaacgcaagtttttcgacgttatgcagaacgtaagacatcttggaaacgtccgttgttgtttatccaatttgccggtatgacttttattttaggttttcttatggttgtattctgccaatatcacatggcgatgaacaaagatttgggatataatcccgaacgcgtggtaatgggttggaagaagctgggcagtaaccggcaaaatgccaagagtttttttatgaatttgcctatggttgaggaacatggggtaggtcagcaggccatctggagaagttggtcgggagaggtgttcaatgtgggggaaggacggactatcaaaggccggtttgagtggatcggagatgattttgtgcctatgatgaaaatacagatattacatggtaaaaatgtaacatctccaaaagaggccttagtgaatgaagagtttgtacgtcgggccggatggacggatgagccgatagggaaacagttgtctatatggggaaaggaagttacaatcgttggcgtaatgaagaatttctctgttcaaagtgtatatcatcctcagtatccggtattactgttgggaagcggtagtgattctaacccggggcttcattacgtacgattgaaagagccttttgatgagaacctgaagaaactgaatgcattaatggcggaaacttttccaacagaagacattatcttttattcgctgactcaaaagctggatgagcaatatacggatattacacgttttcggaatgcagtacttttggcgtcaatctctattttctttatagctttaatgggattgttgggatatgtcggtgacgagattcgtttttgcaggaaagagattgctatccgaaaagtgaatggtgcggatacttgtggcatattgaaattgttttccgcaaacgtattgtggacagcccttccggcggtgcttatcggtgcaggactggcctattggataggtatgaaatggttggaacaatttagtgaatccgtcaatctgagtatttggttatttgccggagtcatagcgtttgtattagttgtgatactagtttgtgtaatacttaaagcatgggaagttgctaatgagaatccggtgaacagcatagcgaatgaataattgaaatataatgaatttaaaatataattgagaaaaatgatacaaatcgaaaacatcagtaaagtattccgtacttccgaagtggagacggttgcattgaatcatgtaaatctagaagtaaaagaaggagagttcgtagctattatgggaccctcgggctgtggtaaatccactttgttgaatatcctcggacttttggataatcctaccgaaggctcctatcagttaatggggcaggaagttgccgggctgaaagagaaagaacgtactcatatgcgtaagggtaagttaggttttgtatttcagagtttcaatctgatagacgaattgaatgtttatgaaaacgtggaacttccgcttacttatctgggactaaaatcttccgaacgtcgccgaatggtagaagatattctgaaacggatgaacatcagccaccgtgccaaacacttcccgcaacaactctccggcgggcagcaacaacgtgtggcaatcgcccgtgcggttgtcaccaatcctaaactaattcttgccgatgagcctacaggtaaccttgattcaaagaatggtgccgaagtaatgaacctgctgacagaactgaataaggaaggaactacaattattatggtgactcactcacagcatgatgcgagttttgctcatcgcactgtacatttgttcgatggaagtattgtagcgagtgtaacagcctaaatgagaaatcgacaatgagacaaatctactatactttatgcacattgttacgcgaatgcgggtcgaatatcataagagtaatatccctctctttaggtcttaccattagtgaagcgtcatttgtcctctcctgaagtac

SEQ ID NO: 3115 - DNA, 292 bp, Unknown
  gut microbiota DNA sequence
tggttatttacggattcctcggctttgctgttttttttgtagtaatcatgaattatatgttgatatccattgccactttgagccgccgtgcgaaaggagtaggtgtacataaatgtaatggagctagttcgaccaatatcttcaatatgtttctggtagagacaggagtccttgtcattatctccgtattagttagcttcttactgattttcaatgcacgtggtttgattgaagatttactttctgtccggctttcctcgcttcattctgctgattgtcatcatgggactga

SEQ ID NO: 3116 - DNA, 72976 bp, Unknown
  gut microbiota DNA sequence
tgtgaacgatgaaactcaacgccggagcaaagagatagctatccggaaggtgaacggagcagaagcctcacacatcttgaggttactgacacgcgatattctttgcgtttccgtcatttctatcctgataggtacggctgtgtcttattttgcaggacgggcatggctcgaccagtttgcagaacagattgattggaatccgttactttttataggtacagccttatttgttcaattgctgattatactttgtgtggtactcaaagcatggtatattgccaatgaaaatccggtaaagagtatcaaaaccgaatagaaataataggcagaatagggtagatactaccttattctgctatcggatgttgtttggaaaccttcttgatatagattattaaactgactaccgccgtgataaatgccaacgcatccgacaccggcatactaatccagatccccttcaatccccaccaattagggaaaagtaacaaacaaggcaacaaataaagcaactgccgtgtcaacgacaggaaaatacttattttagccttgccgatgctttggaagaagttaccgataacaatttgtgctcctacgaatgggaacataatcaccgtgatgcgaagcccgtcgacggcaagatcgatcaaatgatcgctgtctgtgaaaatggccgatactgcatggggaaaaagttcacagataaagaatccgctactggtgataaccacccccgaaacaattcccagtttcaacgtctgtttcacccggtctatcttctgtgctccgaagttgtagcctacaataggctgcattcccatagttaatccgagcacaatcattacataaagcgttagcaaccggttgataataccatatgccccgatagccatatcgcctccatgattttgtagactgttattgataatgattactatgacacaagcacatacattcatcaggaacggcgacatgccgatagcgaagatattgccgacgattctacgcttcattttccataccttcccttcaaaatgtaccgtactgtcctgcttgaagaaatggctcactacccacaccataccgatcaactgtgaaatgactgttgccgtggcagctccccgcattccccattcaaagtgaaagataaagataggagcgaggatgatgttggagagcaccgttgccatggaagtaatcatagccttcttcggatatccggtggcacgcatcacgttattcagcccgatcatcgtatacgtgatcggtgttcccaataaaataacctgcataaagctgcgggcataaggcagcgtatctgcgctggcaccgaaaaagaccagtatatcatcgaggaagataaaagacaatattccgaaaaagaaagaattggtgatacaaagcattaacgtgtgcgacaggatttccgtagcccctttcatatctttctgccctagccggatagatgcgagcgtggaacctccggcagaaacaagtgtacagaaggcaaccaccagattcatcagagggaaactcaccgccagtccggcgatagccatggcgcctacaccgtgcccgatgaatatgctgtcaataatattgtagatagaagtaattgtcatcccgataatggcagggatagaatactgcaacagcagtttgccgatactctcttttcctaatatatgcgggtcgtttttactcatgcgtctgaatctttaatgttggatgaaaaacgaaagttacgtttttttaagtagtgcaaaggtacgaataatttgcctgattcgatgattattcggaactttgcacaagtcaatacacaaggtttaacgtttaaggtaaaaagaaagtttagctatggatacaacaaaaataattgcagtattattcgattttgacggtgtgattatggacaccgaaacccagtatactgtcttttgggacgagcaagggcataagtacctgggggaagaagacttcggccgctgtattaaagggcaaacattgacacaaatctatgagaaatatttctcggacaaaccggaagctcaggaagaaataaccgcccgcctcaatctctttgagaaagcgatgtcctacaaatatattcccggtgtagaagcttttatcgctgaccttcgccgtcatggtgcaaagatagcggtggtgaccagttccaatgaagataagatgcagaatgtttataacgctcaccccgaatttaaaggaatggtagaccgaatcctgaccggcgagatgttcgcccattccaagcctgctcccgattgtttcctgttgggtatggaagtattcagtgcgactcccgaaaacacctacgtatttgaagactctttccacgggttgcaagccggaatgacatccggtgctaccgttatcggtctcgccactactaacacacgaaaggccattaccggaaaagcacactatataatagatgactttgcggaaatgacctacgaaaaattgcttacgatgcaacgttaacgctatttcctacaatatttcagtttatccttttaatcgttgcaaggcaattttagagaacgattgaaaggatttcttgtttttctttcccagttatgaattaaatgttataactttgccacaatttttgatagcgtccgacgctattatggtactttagtttttaatttaaaatttaaaagacatggctggttatatatcagatgatacaagaaaagtgactactcatcgcctggttgaaatgaaacagagaggcgaaaaaatatctatgcttactgcgtatgattacactatggcacaaattgtagacggtgcgggaatggatgtaatccttgtaggcgactctgcttctaatgtaatggcgggtaatgtgactacattgcctatcactctcgaccagatgatttatcatgctaaatccgtggttcgcggagtaaaacgtgctatggtggtagtcgatatgcctttcggttcctatcagggaaatgaaatggaaggccttgcttctgctatccgtattatgaaagaaagccatgcagacgcattgaaactggaaggtggagaagaaatcatcgacacggtgaaacgtattatcagtgcaggcattccggtcatgggacacttgggactaatgccgcagtcaatcaataaatacggaacctatactgtgcgtgccaaggacgatgctgaagcggacaaactgattcgtgacgctcatctgcttgaagaagcgggttgtttcgccattgttctcgaaaagattcccgctactcttgccgaacgtgtagctgccgaactgacaatccctattatcggtattggtgccggtggtcatgtagacggtcaggtattggttattcaggatatgcttgggatgaacaacggattccgtccgcgtttccttcgccgttatgccgatttatacacggtaatgaccgacgcgatcagccgttacgtatccgacgtgaagaattgctacttccccaacgagaaggaacaatattaagataatatatggcagttaaattgtggacagtacattttatgcggatatgtgtagctaatttgctgttgtttatatccttgtacgtgttgtttccggtgcttcccattgaaatgtcggaacgtctcggattgccggtgacggagacaggggttatctttctctttttcacgctgggaatgttccttatcggtcctttccatgcctatctggtagatgcatacaaacgtaagaatgtatgcctgttttcttttgcccttatggtagcggcaacggtaggttatgcttttgtgacaaacattacggaacttatcctgctgagcaccgtgcagggactggcattcggtatcgctactaccgcaggaattacgctagccattgacattacgaactctacgcttcgtagtgccggaaacgtcagtttttcatggatagcacgactgggaatgattctcggaattatcctcggcgtctggttcgaccaacactatgcatttaagactttgctaacggtatccgttactactggtgctttggggattctgacagtagccggtgtttatgttccctttcgtgcaccgtttgtcactaaactgtattcattcgaccgctttctgctgcttcgcgggtgggttcctgccataaacctgatcctgataacgtttataccggggttactgattccgcttgtacatccttccctcaacgatatcgtactgggagatacgggtgtatctatgccctttttcgccggagtgggaatgggctatctggcttccctggttatcgctcgcttgtttatcctgaaagagaaaacgctgaggttggtgattatgggactcggattggagatactggcaatctgcctgttgaaagcaggttattctagcggtatttcttccgttctgctgggattgggattaggactgataatgccggaatttctggtgatgttcgtaaaactgtctcaccattgtcaacggggtacagccaatacaactcatctgctggctggtgaagtcggcattacacttggaattgctgttgcgtgctatatggatacggataccgatcaaatgttttacataggacaaatcgttgcttcggtcgccttattgttctttgtgctgataacgtatccatattatatcaaaaagaaagtgagataaggcgtcattatccctacggcattatgacgctatgatataaaaatagtgacgctattacttgcggatagcgtcactatttttatatagattcggttcttaattccggcttacttgttttactccctttaccgtccgtagcttcttgataagagcttccagatgtccggtgtcacctaccatgacagtcaacgttccggagaacaacccgtcgttggaatcaatcccgatagaacgcagcgtgataccattctctttggaaatgatagaagtgatatttgttacaataccgatatcatcatgccctacaacacgcagcgtaataggatattgcgtacctaccgacttacccgcccaacgtgctttcacaatccggtagccgaaacgctcgcgcatttgcgtagcattcggacagtctgcccggtgaatcttgatacctccgctcactgtcacgaatccgaacacatcatctccgtaaataggattacaacattttgccagtttaaattccagtcctttcaggttctggtcgatcacaagcacatcctctttggatgttgattcctcctgtgcggcttgcaaattgtaaccctcggcgctacggtaaataatttcatcatgcgtgtcgttgtcccgtttctgctgttcgacatatttatccagcgtctcgttgacatccagcgctccgtccgctattttctgataaaactccgtcacatttttgaatcccagacgcttgataaggcgcatcattgtcgcttcatcatattccagtttgcggtttttgaactttcgttccagcgtctctttagcgaaagcgtgctggcgtgccaccatttctttgagtgcctgccgtatcttggtgcgtgctttagaagtcgtcacgatgttcagccagtcctgttttggtgtctgggtgttcgatgtcatgatttccacctgatcgccgctgttaagcttctgtttcaactgtacatttttgccgttcactttggcgccgatgcatttgcatcccagcttactgtgaatatgaaatgcaaaatcgagtacagtagctcctttggcaagtttgaataaatcccctttcggggtaaatacaaatacctcatcttcgtaaaggtccattttaaactggtccataaccttcatcgaatcgttgtcggcgttttccagtgcctccctgacggaagtcagccattcgtccagtcccgtctcgcctttgatacctttatatctccagtgggcggccaaaccccgctctgcgatttcgtccattcggcgggtacggatctgtacctccacccattttccttccggccccatgacggtgatgtgcaacgactcataaccattacttttcggaatcgagagccagtcgcgcagacgcttcgggttcggttggtacatatccgtcacaatagaatacacctgccagcactcctgcttttccttagcgggttccggatcggaatccaggataatacgaatagcgaacaagtcataaatcccttcaaacggggtcttctgcttctgaatcttgttccatatcgaatgtatcgacttggtgcgtcccttaatgtcgaacgtcagtccggcttccgcgaccttcttttttatcggttcgatgaaggcggcaatatatttgtcgcgggaagctttcgtctcgttcagcttctcctttatataataatacgtttcccgttgggtgtacttcaatgataagtcttccagctccgactttagcttgtaaagccccagcttgtgtgccagtggagcatataagtaagctgcctcattcgcaaccttgacgcggtcttcctcgtttccggtatccttaatctggcgcattacgttcacacggtcggcaatcataatcaggatcacacgcatatcttcggcaaatgacaggagaaggttgcggaaattctccgattcgatagccggactcttggagtacagttcattcgttttcaccaatcctttgatgatactgcctacatcttccccgtattcggtgttcacgtcctcaatgctcaggatatgtgctttcacaatttcatgcagcatgattccgataaggcacgaacctttcattccgatttcctcggctacgataacagccgtttgtaaatctctgatgacgggattcatcccgaagttattgcgttgcaacccgttacattgggcggctttgattagatgtttctttaacttttggcaatccctccaggaaatactgtctccggcggattgcattaaatgccggtagagtgaaaaaagctcctttttttcctctgatgtaaaaaagtcgtccatattcaatcttgttaattcgacgtaaaattactttttttcttggttattcggtaagaagtaaataacattttgtatttttgggcatcaattaattaaaatagatagtatgataacgacacaggacaaagagttgcttgccaaaaaaggcatcacggaagcgcaaatagcagagcaactagcatgcttccagacgggtttcccttttttgaaactggatgcggctgcttccatagagaaaggtatcttagctcccgatgcagaagaacaaaaagcttatttagctgcttgggacgcatataagaacacagataagactattgtgaaattcgttcctgcctcgggtgctgcgagtcgtatgttcaagaacttgttcgagtttctgtctgccgaatatgacaagcccactacaaagttcgaacaggcattttttgacggtatcaggaattttgctttctatgacgatttgaatgtagcctgccagcgtactgccggaaaagacataccgggactactggaagaaggcaattataaagctgtggtagccgcattgctcgaaacggccggattgaattacggcgcacttccgaaagggctgctcaaattccacaaatatcccgaaggcccgcgtaccccgctcgaagaacatcttgctgaaggtgctatgtatgctgccggaaaaagtggcaaggtcaatgtacatttcactgtatctacggaacatcgcgaactattcaagaaactagtggaagaaaagaccggagaatttgcgaaacgctacggagtggattactacatcaccttctccgagcagaaaccgagcacggacactattgcagccgatatggacaaccaaccgttccgcgataacggtaaactgttgttccgcccgggaggacacggtgcgctgatcgagaacctcaatgaccttgacgccgatattatctttatcaagaatatcgacaatgtagtgcccgataaactgaaagctgacacagtgacttataagaaactgattgccggtgtactggtaactttgcagaaaaaagctttcgagtatcttgagttgcttgatagcggaaaatatacgcatgagcaagttatggaaattcttcagttcctgcaaaaacaacttttctgcaagaatcccgaagtgaaaaatctcgaagacgccgagttggtgatctatctgaaacagaagttgaaccgtccgatgcgtgtctgcggtatggtgaagaacgtaggcgaaccgggtggtggtccgttcctggcatacaatagcgacggaacaatctccctgcaaatcctcgaaagttctcagattgacatgaatgaccctgcaaaaaaggaaatgtttgagaagggaactcacttcaatccggtagacttggtttgtgctgttcgtgattacaaaggacataagtttgacttagtgagatttgtagataaagcaaccggtttcatttcatataaatcgaagaatggtaaagacttgaaggctcttgagcttcccggcttatggaatggtgccatgagtgactggaatacggtattcgtagaagtaccgcttactacctttaatccggtaaagactgtaaatgacttgttgcgtgagcaacaccagtaatcagatgttgaaaaaacaagatgataattacagccaattatagatattagagaaagcgaccgcttgataatttaggattgagcggtcgtttatatgccacagacctataaaaagagtgtttagatgaatcagattgagaagattattgatattgctacttggaacagaaaagaacattttgaacattttagtgcctttgacgatccttttttcggtgtaacggtcaatgtagactgtacccgtgcttaccgggaagccaaaaataaaggcgtttccttttcccttttgctcctgcatcgtatcatcacggctgccgccaaagtagaagagttccgttatcgtatcgaaggagaaaaagttgtatgttatgacagtctcctgcccgaagctaccgtaggtcgtgccgaccatacattctcattcgcttcctttgaatacgatcccgatgaactgacctttatcctcaaagcgaaagctgaaatggaacgactgcaaactactaccggattgaataaggaaggaacttttcatcccaatgccattcattattcggcagtgccgtggctcacctttacagacatgaagcaccccacgaacatgcgttcgggtgacagcgtaccgaaaatatccacaggaaaatactttcgggaaggggagaagttgatgttacctatttccgtcacttgtcaccatgggttaatggacggttatcatgtggcaaaattcatcgaatctcttgatttgtaggttcgcaccaatttataaagactaaacaaaccatatatgagaccaaaggtattaaagtgggaggtcatcattctttgcgtaatactattttttccggggatttccttgaatgcacaggaggttcggcaggatgatatttatgaaatccggcaaagcagtttctcgaggtatggatttgatacgctctctgtgcatactcctcatcgctttattcatcgtctgggggtggaagtccgtccgcaatatgtgtttcctaccaatcccttcttgcagggagaaaacgaacgctggcaacccattcagacctcttttgccgctcatttgaaatattcattccaattccgtcccaacacctgtgccgaccgtatttatggtggtgcttatcagggattcggcttgtccgccactaccttcggagataaaaaacaacttggagatcctatctcattttatgtgtttcagggggcgcggattgcccggtttaatccctgtctttcgctcaactacgaatggaacttcggtctgtccgccggttggaaaccgtatgataatgattataattcctataatggtgcagtcggttcgcgaatgaatgcctatattaatgcaggtatctatctgaactgggcattttcccgttatttcgacttaatcattggcggtgatttcactcatttctctaatggcaataccaaattcccgaatgcaggggtaaataccaccggagccaaaatcggattggtgtataactttaaccgtacagaagaagaacttacaaagtctctgcttcggccggctattccccgctttccgcgtcacataagttatgatctggtattattcggctcatggcggcgaaagggggtatatataggagacgggagacagattgcctcgcccggtagttatccggtggcaggattcaacttcgcgccgatgtacaacctcggttataaatttcgtgttggtgcctcgctcgacggagtttacgacggtagtgccaatgtatatacctatatggaagattatattgtcgattcgaatggaaacggcacgcctcctccacgtcaatttctgaaaccgggcatccagcatcaactatcactcggcgtgtcgggacgtgcagagtatgtgatgccatattttacaatcggcgtaggcatcggagccaatgtgctcggtcgtggtgacttgcgggggctttatcagatattagccctgaaaataggaattacccgcagtactttcctccacatcggttataatcttcagaacttccagacccctaattatctgatgctcggcttaggtttccgttttcacaataaatatccaaaagtacgtcactaaaaaagccatatttcatcgaaatgtactaattttgcatcattaacataaaacactcaaaataatgaagaaaatattgttgctcggttccggggaattaggaaaagagtttgtaatttctgcccagcgtaaaggtcagcacattattgcttgtgactcgtatgccggagcgcctgctatgcaagtagccgacgaatgtgaagtattcgatatgctgaacggcgaagaactggagcgtatcgttaagaaacatcagccggacattatcgttccggagattgaagcaatccgtacggaacgtctgtatgattttgaaaaggaaggtatccaggtggttcccagtgcccgtgccgttaacttcacgatgaatcgtaaagccattcgtgatcttgctgctaaagaactcggactgaaaactgccagatatttttacgctaagacattagacgaactgaaagctgccgctgctaaaataggtttcccttgtgtggtgaaaccgttgatgtcttcttccggtaagggacagtcacttgtgaaaagtgccgacgaacttgaacacgcttgggagtatggatgcagtggtagccgtggtgatatccgcgagctcattattgaggaatttattaagttcgacagtgaaataacactattgacggttactcaaaagaacggtcccacgttgttctgtccgcctatcggccacgtgcagaaaggaggcgattaccgtgaaagtttccagcctgcgcacattgaccctgctcacctgaaagaagcggaggaaatggcagagaaagtgacccgcgctttgacgggagccggactttggggagttgaattcttcttgagccacgagaatggcgtttacttctccgaactttccccccgtccgcatgacaccggtatggtgacattggcaggaacgcagaatttgaatgagttcgaacttcatttgcgtgctgtgcttggacttcctattccgggcattaagcaagagaggataggagcgagtgccgttatcctttctccgatagccagccaagaacgtcctcaataccgcggaatggaggaagtcactaaagaggaagatacttacctgcgtatattcggtaagccgtttacccgcgtcaaccgtcgtatgggagtggtactgtgttatgctccgctcgactccgatctggacgctttgcgcgataaggcaaagagaatagctgaaaaggtggaagtatattaaatatccgatcgatatttaatataaaagctccaactcaccggatttataaattccggcgagttggagcttttatttttaaatcggtaggtatcttcggatgtgtccgaacacaaaactagttgccggtgctactattttgtttttttgctaatgttctgattataaacaatgagtctgaaaacttattagaatcaaacatatacagttgttattttataagtaacagaaactttttgctgactatttgtaatattataaactctgttttggtctatttgtagtctttattggcctaacaagtgttatcgaacgacaaattttaaaaaagaaagaacaatctcacggatttgtttctacatttgcgcagttgtttatataactatttctttaggtgatagtttatcagaaataaaatatagatgaacaaaagtggaacttagctgttattataatagtaaaaacagataaagcgcgaagcattcgttccttgtcatactatttaagattcaataggaaagaaaaagaataatataaaaaagattgcttatgtcacagattatcggacatatatcccaggtgatcggccctgtggtcgatgtgtactttgaaggtacagatgcagaagtgatgttaccaagtatacatgatgcactggagataaaaaggccaaacggcaaaatactgattgtagaagtacagcaacacattggtgaaaatacggttcgcaccgtggctatggatagtaccgacggacttcagagaggcatgaaagtgcgccctaccggaggtccgataacaatgccgattggtgaacaaattaaagggcgactgatgaatgtggtcggtgattctattgacggtatgaaggaactcgaccggaaaggtgcatattccattcaccgcgatcctcccaaattcgaagatttgactaccgtgcaggaggtactctttacgggtatcaaggtgatcgacttgctcgaaccgtatgccaaaggtggtaagatcggtctgttcggtggtgcgggagtcggaaaaaccgtattgattcaggaacttatcaataacattgccaagaaacataatggattctctgtatttgccggagtaggtgagcgtacgcgtgaaggtaacgacttgcttcgtgaaatgattgagtcgggtgttattcgctatggcgaagcattcaaagaaagtatggagaaaggggattgggacctttccaaagttgattataacgaattggaaaagtcgcaggtatctctgatattcggccagatgaacgagcctccgggtgcacgtgcctctgtggcattgtccggactgacggttgcggaatctttccgtgatgccggaagtgaaggtgaaaaacgcgatattttgttctttattgacaatatcttccgtttcacgcaagcgggttcggaagtctcggcattgctggggcgtatgccttccgccgtgggttatcaacctactcttgctacggaaatgggtgcgatgcaagaacgtatcacttccactcggaaaggatctatcacttccgtacaggcggtgtatgtgcctgccgacgacttgactgacccggctcctgcaactactttcagccacttggatgcgactactgtacttgaccgtaagattacggagttgggaatctatccagctgtggacccgttggcgtccacttctcgtattcttgatccacacatcgttgggcaggaacactatgatacggcgcagcgtgtgaaacagattctgcaacgtaacaaggaattacaggatatcatttctattcttggtatggaggagctttcggaggaggataagacagtggtgaaccgtgcccgccgtgtgcagcgtttcctttcgcagccgtttgccgttgccgaacagttcacgggtgttccgggagtaatggtttccattgaggatacaatcaagggatttagaatgattctggatggtgaggtggataatcttcccgaacaggcgttcttgaatgtaggtacgattgaggaagctatggagaaaggtaagaaattgttggaacaagcgaagaaataaaaaacgttgcgatgaaagaactgcatttgagtatagtgtcgcctgaaaagagcgtattcgacggagatgtgaagatagtcacattgccgggtacgatcgggtcgttttccattctgccgggacatgcgcctatcgtctcgtcattgaaagcgggaacattaagttataccacgctggacggggaggagcatacacttgatattcagggtggttttgtggaattgagtgacgggacggtttctgcctgcgtttcgtaggcggacctcctgaaatatagttgaattggaaaaacgagatttagaaaatacagtagaaaaacacagtgacatgatgaacattagtaaaactaaacggaattttatcggcttgaacactttatttgcaattctaagtgcaggagtcggtgcagtgattttacacgttgccctaccgggacattatttcggaggatatccgtttattccgacatatttctatctgtttggtttgttcagtatctatatgttcgatgcgtgtcggcagcatgctccgcaaaagatgttactgctgtatttggcaataaaaatggtaaagatgattctttcgatcattctagtcttgatttattgccttgccgtgcgtgaagaagctaaagctttcttgctgacgtttatctcgttctatttgctgtatctgatatacgaaacatggttcttcttctcgtttgaagtgaacctgaaacggaaaaagaaaaataagaataaaaatgaaacagttgcgtaacatattaaccccgttggtgctgctctgtctgttggcagccggcttccctgtttttgcacaggaacaggaagaagcggctccgaagatgcaggatgagatgacttctaaagaagaaaaagagaatacggttgatgtgaaagagatcgtgttcgggcatatcggcgactcatacgaatggcatattacaacgtggggtaaaatacacattactataccattacctattattgtttatagtagtactacaggttggcatacttttctatcttcgcgtcttgaagagaacgggggtagttatgaagggctttccatcgctcccgaaggaagtaaatacgaaggtaaactggtagagtataatgcagccggagagcaagtgcgtccgtgggacatttctatcacaaaggtgacatttgctttgctgttcaacagtgtgctgttgctggtgattgtattgagtgtagcccactggtatcgaaaacgtcctcgcggagcgttggcaccgggaggattcatcggattcatggagatgtttattatgatggtgaacgatgatatcatcaagagttgtgtcggtcccaattatcggaaattcgctccatatctgctgacagcgttttttttcatctttgtcaacaatataatgggattgatcccattctttcccggtggggcgaatgtgacgggaaatattgcgatcacaatggtactggctatctgtacgttccttgcggttaatattttcggaaccaaacattattggaaagatattttctggccggatgtaccctggtggttgaaagttcctgtgccgatgatgcctttcatcgagtttttcgggatcttcacgaaaccgtttgcattgatgattcgtcttttcgccaatatgttggcaggacacatggcaatgctggtgcttacttgcctgattttcatctctgcaagtatggggcccgcactgaacggcacactgaccgtggcttccgtactgttcaacatctttatgaatgcgcttgaactgttggtagctttcatccaggcatacgtgtttacaatgctttcggcagtgtttatcggactggcacaagaaggcgcgaaggtgagtgaaggcggaagaaaaataaaagagaattagataagagagcaaataaaaaatataaaccattttaaaactgaaaattatgttactatcagtattgttacaagccactgcagcagcagtaggagtaagtaaattaggtgcagctatcggtgcaggtcttgcagtaatcggagcaggtttgggtattggtaagattggtggttcggctatggaagctattgcgcggcagccggaagcatcaggtgacattcgtatgaatatgattatcgcggcagccttgattgaaggtgtagctttgttggcggtagtagtatgtctgttggtgttcttcctctaagcaggtggaataccgacaaactgtaaatcaatattcatcattctaaattacaagaaatgtcattactattacctgatagtggcctgttgttctggatgtttgtcgcattcgggattgtgtttgtgatattggcaaaatacggtttccctatcatcattaggatggtggaagaccgtaaagtctatatcgaccagtctttggaggtggcaagagaagccaacgcacagctctccaaactaaagcaggagggcgatgcgcttgtggctgccgccaacaaggaacaaggacgcatcttgaaggaagcaatggaagaacgtgacaagattgttcacgaggcccgtaagcaagccgagatagccgcacagaaggaactggatgcggtgagacaacaaatccaggtggagaaagacgaagctatccgcgacatccgtcgtcaggtggctgtgctttctgtcgatattgccgaaaaagtgctccgtaagagtcttcaggacaaagaagctcaaatgggcatgattgaccgtatgctggatgaagtattaacccctaataagaactaaggaaaatggaagtcggaatactctcaatgcgatatgccaaagcgatgattgaatacgcacaggagaaaggagtggaggacaagctctaccaagagttcctcacactgtcttattgcttttgcgcccaaccgggtttgcgtgaagcactggataaccctgttatctcaaccaaagagaaattggcgctggtatgtacggctgccgatggcaacggtaaatccaccagagagtttgtccattttattactttggtactgcgaaacaggcgtgagggatatttacagtttatcagcctgatgtatctggatctttaccggaaactaaagcatatcggggtaggcaaactgattacggctgttcctgtggacaaggagacggaagaccgtatccgctccgcagcagcgcatatcctgcatgcgcaaatggaactggagactgtggtagatccgtctatcgagggcggattcatcttcgatattaatgattatcgactggatgcaagcattgctacgcagttgaagcgagtaaaacaacagtttattgataagaataggagaattgtataatgtctgaaaatattaaagtaagcgaggtttccgatatattgcgtaaacagctcgaaggtattaatacccatgtgcagcttgacgaaatcggtacggtgcttcaggtgagcgatggtgtggtgcgtatctacggactgcggaatgccgaggctaacgagttactggagtttgacaacggcattaaggctatcgtgatgaaccttgaagaggacaatgtgggtgctgtgttgttggggccgactgacagaatcaaggaaggctttattgtgaagcgtaccaagcatattgcttctatccgcgtaggagaaggtatgttggggcgtgtcattgacccgctgggtgaaccgctcgacggtaaaggcttaattggtggtgatttgtatgaaatgccgttggaacgcaaagcgccgggagtaatcttccgtcagcctgtcaaccagccgttgcagacaggactgaaagctgtggatgccatgattcctattgggcgtggacaacgtgagctgattatcggtgaccgtcagacaggaaagacggccattgcgattgatacgattatcaaccaacgtaccaacttcctggcaggggatcctgtatattgtatttatgtggctatcggtcaaaaaggttctaccgtggcttctattgtaaatacgctccgtgagtatggtgctatggattataccgttgtggtagctgccacggctggcgatccggctgcattacagtattacgcgccgtttgcaggggctgctatcggcgaatatttccgtgataccggccgtcacgcgctggtggtttatgatgacctttccaagcaggcggttgcctatcgtgaggtctcattgatccttcgccgtccgtccggacgtgaggcttatccgggtgatatcttctacctgcattcccgcttgttggaacgtgcggctaagattatcaaccaggaggaagtggcgcgcgagatgaatgaccttcccgaaagcctgaaaggtattgtgaaagggggtggttcactgactgccttgcctatcattgagacgcaggcaggagacgtttcggcctatattccaacgaacgtgatttctatcactgacggacagatattcctcgaaacggacttgttcaatcagggtgtccgcccggctatcaatgtcggtatctctgtatcccgtgtaggtggtaatgctcagattaaggcgatgaaaaaagtggcaggaacattgaagatagaccaggcacagtatcgtgaattggaagcattctccaagttcagcagtgatatggacccgattacggcattgacaattgacaaagggcgtaagaatgcgcagttgctgattcagccgcaatacagtccgatgcctgtggaacaacagattgctatcctctattgtggtacacatggtttgctccgtgatgtgccattgaacaacgtgcaggattttgaacgcagtttcatcgagtctctgcaattgaatcatcaggaggatgtgttggatgtattgagaacgggtgttattgatgataatgtgactaaggctattgaagaaactgctgctatggtcgctaaacaatatttgtaattcaagaaaactatggcttcactgaaagaagtaaaaaccagaataaattcggtcaaaagtacccgaaaaatcacttcagcaatgaagatggtggcttctgccaaactacataaggcacaaggagccattgagaatatgttgccctatcagaagaagttgaacaagattctgactaactttttgagcgctgatcttccgatagagtctccttacatacgagcacgggaagtgaagcgtgtggcgattattgctttttcttcgaatacatcactttgtggtgcttttaatgcaaatgtcataaagatgttattgcaaactgtcagcgaataccgtacgctgggacaggataatattttgatctttcccataggaaagaaggtggaggaagctgtgaagagaatgggattccagccgggggaaatacctccgacactttccgataaaccaacttatcaagaagcttccgagctggcggatcttctaatgaaaatgtatgtggcgggagaaattgaccgtgtggaattgatttatcatcattttaaatcaatgggtgtgcagattctacttcgtgagacttatctgcctattgaccttacacgtgcagtagaagaaggtaaagaactggaaaaacagaaagaagaagagcgtgaagttgtgaatgactatatagtagaaccttctgctgagcaattgattgccgacttgatacctactgtattaagccagaagctctttactgctgctgtggattctaatgcttccgagcacgcagcacgtacattagcaatgcaagtagctacggacaatgccaacgaattgattcaagaccttaccaagcaatataacaagagtcgccaacaggcgattacgaacgaattgctggatattgtgggtggttcgatgcagtaattacgacaattaataacattattttttgattcaatatcccgtttttaaggtgaaacttaaaaacgggaatttatatatatatatttgcgttggaaatagtcttgaatttttatttatattcaagcaaaacaaatatacgaagtagttttcggacataatagcacatcacttagtgttctaatttgatccgtcgtcccggttgctttctagcgggaaaaacagccgggactttttgtctgattctcatttgactattttatgcggaaaagtttagtacttttatttcaatctctatatagttttccgtacctttgcacaaaataatatactttcatggaaaataatcctgaactacaacttgcttggcagttcattgaaaatacaggcacacacctgtttcttaccggaaaagccggaaccggaaaaactacatttctaaaacgattgagagagcatacccccaaacgcatggtcgtattggctccgacgggtattgcagcaattaacgccggaggggtgacgattcattcttttttccagatatcttttgctccatttgtgccggaaacgacttttaactctgcgcaaatacaataccgatacagtcaagagaaacgtaacattatccgaagcatggatttattagtgattgatgaaatcagtatggtacgtgcggatttgctagacgcagtagatgcgactttacgtcgttatcgcaatcgcgaaaagccttttggaggggtacaactgttgatgattggagatttgcagcagttagctcctgttgtgagggacagcgaatggagtttgttgaggaattattacgaaacgccttatttttttgccagccgtgcattgagagaaacgacctatatgacaattgaactggaaaaggtataccgtcagaacgatactttttttctttctctgttgaataaaatacgtgagaacaaagcagatgatgaagtgttgaatgagttgaatcggcgatatcagcaaggcttccaaccgcctaaagaagaaggatatatccgtttgacaacacataacaatcaagcacagcaagtaaatgatcgtgaattggcttctctaccgggaaagccttatcattttcgagctgaagtgacggggacttttcctgaatatacatatcccgcagatgaaattctcactattaaagagggtgcccagatcatgtttctcaaaaatgatgtttctttggaaaaacggtattataatggtatgatcggagaggtggtagccgttaatgattctgagatatatgtgaaagaaaaagggagtgaggaggattttctgttgttgccggaggaatggggaaactataagtatgtgttaaatgaggaaacgaaggaaatcactgaggtgatagaaggaacattccgtcaatatcctattcgattggcatgggctatcacgatacataagagtcagggattgacatttgaacgtgcaattattgatgcacgcaattcctttgcgcatggacagacatatgtagctttgagtcgttgtaagactttggagggcttggtattggagtctccattgcgtaaggaggctattattagtgacagtgtggttgataacttcacaaaagaggtggaacggaataaaccgggaaacaagcagctaagtgatatgcagaaggcttatttcttcgatttgttgagtgatttgtttaacttctattccctcgagcaggcttataaacggttgcttcgtatgctggatgaagatttgtataaactttaccctaaattacttaccgaatataagctattggagcctcatattaaggaaaagatagtggaagttgcccaccgtttccgcaatcagtatacacgtttgattaatgagagtgaagattatgcttcggaccaggagttgcaagaacggattcgttccggtgcggtgtattttcataaagagctggaacctattcgtgttttgtttgcaaagactaatatacctcttgataatagggagttgaggaaacaactgaatgaacgtttgcaagcgttggatgatgcattgtggattaaagagtccttattgaaagctatgtgtgtgcaaccttttattgttgctgaatatttgaaattgaaagctaaggtgatgttaagtcttgaggacaactcttcttctccttctcctaccgctaaaacattgagagagagaaaagaacgggtagaacgtacacgtagtagttttacaaaagtaaaagtagaagttcctacggatattctgcatccggagctttatcgcactttatcggaatggagaacggaaaagacgcgtgaaaccaatatgcctgcttatgtcattatgcaacagaaagcattaatgggcattgtaaatcttttgccggatactccgcaagctttggaagctgtaccttattttggagcgaaaggagtggagaaatatggacttgaaattttggggattgtccgtaagtatatgagggagaatcaagtgaaacgaccggaaatcaaagagatatttcttccggaaaaaagtaagaggggagaaaaaaaggaaccgaagaaagatacgaaacagatgagctatgagatgttttgtaagggaatgagtatggaggagatagctaaatcacgtgatttggtgacgggaacaattgctacgcacttagaacattatgttcgtatgggaaagattaaattggagcaagtagtagctgtagaaaagatagagaagattcgtcggtatcagcaaaagaacgagaattccggagtggcaggaataaaagcggcgttaggagacgaggtctcctatgccgatatcagatttgtattcgcagccgatgatgctaggcgttgaagctcttagaatttgcagaagaaagaaacgaataccggaacactcatatcaatgagaatgccgtgtaggatagcaatcggaatcatttcttttcccgaatatctgctgatagaaggcaataatacatccatggaattgactcctgccacagagataggagccaatttcccgaaatactttttgataagcggagtgccgagaagtgccatcatttcacggaagatattagtcagtagggcgattgtgcctagttctgtggcaagttgcagtccgatagacggttctttgaactgggtgataagaatggaagagagtgaatagtaggcaaatccgcttcctactgccatacagtcgaacacgctccattgacttaccagtatgcttgccagagcagagaataataatgttccgatgatagttcccaacggaattagtaacatcttgggatgcaggtgtgaaatgattgttttcagatttttgttggaaccgatgctaactcctacttgaagcattagcgcatatagtatgtacatagaaatagtatgcgtgtcaaattgaaacttattgagagctcccatgatacagcctacacaaaagaataatattacaatcagacttcctttcattgttcgcctcctttcttgaagaatagttgtaaaaccagccgggcagcaatcaagcttcccaatacacccgatatggcaagaatgattgcttgtttaccgaacttaccaagattgtttactatcagactattagagccgatagatacgccaagtataaagagtaagaggaatattgtaagagaaatcgtcttttctgtcttttgtaaaatagtccagttacgcaatacatagccgattccgattcctagaaacatggtagatataatagaaaacatattgtatatatttaggtcaggttatacatttgaataagccacacgaataattctccaaaaagataatttatcttattgaaagtcaggataaatgctacttgtgagcaacagagtgaatcagcaggtagctcctataatcaaagaaaggggaatttagatgaatccactgaaccaatgtacatgcacgcaacatgacttacagaaattggggatttccgcaagaaagtaagcagtgttatgtagttgtaatctctgattcatcattggtcttcttaattttggtgcaaagatatgaactttttgtatattttcaaaataaatatgcaataattatatgctgttccaatccagaaggacttcctttagttttcgcggattgtatccgagtattgttcgtgctttctcgatactcattccgctaaaacgcgggcggggagtggattcttgcatttcttctgtcgtaacaggatgaatgagcgtgcggtttaatttcatgtagtctgctacctgataagctatttctgcaatagtcaaacattcgtcaccacagatatgaaagattccgttggtcgtattttctatcaggcgtcgtatcccgtctgatagatctcctacaaaagttggcgtgcgccattggtcggatacaacacgaatctcttgtccggctttcaaacggttcattactaattgaacgatatttccatgctgtccgggcagtgcttttccatacacaatctctacacgtgcaatggcataattactacaaatatcggcaactttttcttctcctttccatttggtgaatccgtaatagttgacaggagcggggagtatttcttctgtatatagctgtccggttctctcatttatctttccgtcaaatacgaaatcagtggataaatggatgaaacggctttggtattctttgcaaaggtgtgccagttgttctaccgcggtaacgtttatgaggtaagcctcttcatggtgtgtttcacaataatcgggaacagataaagcggaacagttgataactacatccggacaaattgctttgaacaactcttttacggacgcttcattccgtatatcaacttcaatgaaacgatacttctttgtattctctaaagctggaaagatatccgagtgcagggaacagccggtcacattatattgtttatgggcagataaatccttcagtaattggcgtccggtgaatccgttagcaccgatgattaatatatttctcatgattttttataagatgtatagagctgttgttcttgaatatctacaaattagaaaatatctcttttaatagatttaatgagtagctgcataccatgctgttttttcttttgcggaagcgaggtcattagtactgggatcggaaatggtgataccggagaaagtttctatttttacctttcctctactcatagaatagaaataatctgtatttcttttgaatggaacagtacggttaagttgttcgttgaattgagccagtaattcctggttggaacataactttgatacataatctccgcaatcaaagaatataacaggagaatagccgtctaatctttgcagtgacccggttaatgtcgtatcaaatgtatattggctatttatgtccttcattatagctgccaaatgatccaattctgcgcaatccgtgacagcgatagtgccgcatggcatctcataatttgaataaaagtcatcgaatccattgcagatcttttcataattaatttctcctatcaaatactgtccgatctttgcgtatggcataccgtacgccattatttcacaggtagacgctatcagatgattagtcacatttttaagatcataagcaacttctactgtcgacatgtaacaatcatcaaaaagtatatattccattttcaatccggcattggagataccttgagcaagtgtggttatgtcggtttgatattggggatataatcctccgaaataacgtgtcataggtacattctcatactcccagtgcattttgttgacacaaaggttactgcgtgattgggcatttgatacaggtatccatcccataccatgacaaccgataatcatagagtaacgttgggctggtgtacattcccgaacatcattaaggatagacgtaattccttcggctgttgtatatacgggatcagtatactgcttataggtcttgcgcacgcttttaccgttttcataaacgagttcaaaaagagtagcttctgtagcttcggtacacataaatactatgacacgttcattttttagtatattcttttcgattacactctccaagtcactgatattctgatagaagttagaagtcagattgttcgaccaagggagatacataaatatcgtttgctcattatttgcccgtacaataggaggaacaatttcattgggatcagtatccgtaggattttctgtatcttctatatccggcgattcaggaataatatcttctttttcacacgaagccatgctaaaagatagaaatagcacaaagatgattggttttataagatgataatatttttgctttgtcttcattttgtttcttgaattaaattatctgagtttctgcaaaactactgaaaaaatagtgatttctacaactgattgtaggatttctgtgaggtatagacataaaaaaaggagcaacgccttgctccaacctttgttaaccttaaatctaatactatgaaaaacacattgcaaatgtacgcacttttgtgaaatctgcaaataatccaagaaaaaaagtatgttttataacattgattaagagttttatttcccgattctatttttattaaggatttctgccgttaactaaataattttagttgggcattctgaattcatttggcgaacaccctgtgattttcttgaataagcggctgaaatactgtgaattagagaaccctagttcttgtgcaatctgccgagcgttttatccgtatttaccaaccatcctttggctatctcgaaacgtttgaactggatatactctttgaactcttttcctatttcatatttcagtaaatcattaaaatatgcaggcgataaatgcaggagattagcacaatattcatcggataacacatcagttgataggcttactttcacattgaaatgattatcaagcagatgattgaattctctgaacacctttttattgacttcgctacgtgtgataaactggcgttcgtagaagcgggtacaataatccagcaaaagttcaatgtattttgaaatgatttttttgctgtgtcggtcaatgcagcgctcaagctcttgccgaatcctctccaggaactccagaataatctgtttttcgcgtagagagagatgcagtgcttcctccggacaataagagaagaaagtataattgtgtatattgagtccgagcggagtcccgcaaatcaagtcggggtgaaaggccaatatccatcccttggaaggaaattccttgttgttctccttcatactgattgattctccgggagtcaggcaaacgagagttccgtccgagaaatcacaacattggtgcccgtatgcataggcctcacacttacattcactcaacagaatcgtatagaatccgaatttaatgtccgtatgaggagataagtcagccttcgaaaggtcgatgacactgactagcgggtgcagtgtcttacttcccaggcaacaattacattgatgcacggttcctattttgagtactttatctcccatgacgttaacgatctctccggtgtatgttcttagttctgctgtttatattcattcggtgtatatccgacatgttttttaaatagccggctgaagtgttgaggatactggaatcccagttcataagctatctggctgaccgtttgcgaaccttccaatattcgttctttggcaagttcaatgatacggcactgaatatattcctgcgcagttttaccagtttctttttttatcaggtcgccgaagtaattaggagaaaggcataccttgtctgcaaaatatttcacggaaggcaacccttcggtcagtgctacctgcccttggaaatattcatccaatagatgttcgaaccgcacgataatgtctttgtttacctgattgcgtgtgataaactgccgttcatagaaacgcatacaataatcgagtaatagttcgatattgcggacaataagttgtttgctatgcttgtcgatagcatgttccagttcgatttgtattttatgtatacagtccgttacaatttctttttcctggtcggatagatgcaaggcttcattaacttcataagaaaagaaagaataattcttgatattctgtcccagagaagttccccggatcaggtcgggatgaaacaagaccccgatcgattttgtacgttgaggagttttcttccggttatctataccaatcacttgacctggggccatacagacgaccgttccttcctgatagtcataatagttacgcccatatttaaggtctccgcaattaatgtctttcaaaaacagagagtagaatccgatattcatgtgatagtattctactgtttttgtcgcttttgaaaagtcgatcacattcactaaagggtgcaaagtttccagtccgaataattggtcgtactgatcaatagtttcaattttggtaatttcatccatacggcttacagttttatcataggcaaagataaaacttttaagaatatcttatctatatcatatttgcaaaacagtaatataggtacaagaatcagtaatttgtatacaacgttggtagtcaaaggcagaattaatatctttgtggcagatcttaaagcgtatccttgacggaaagcctgtgattattcccggtgacggaagttcgttatggacactgacacattctaaggactttgccaaaggatatgtcggtttaatggcaaaccctcatgctatcgggaatgctttccatatcacaaccgacgaaagtatgacttggaatcagatttatgaaaccattgccgatgcattaggaaaaccgctgaatgcgttacacgtagcttcggattttcttgccggacatggagaaacttatgatttcagaggggaactattaggtgacaaggctgccacagtcgtttttgataattcgaagatcaagagacttgtcccggattttatctgtactgtatcaatggtggacggtctgagacaatccgtgcattatatgcttacacatcctgagagtcaaacgcctgatctggagtttgataagtggtgtgataggatagcggatgcaatgtacgctgcggataaggcttttaaatcaggcaaatagtaaacctagccttcatatatattagtaaggaccgtttcgcccttgctgtacttcaatccgtataccgaaattaccgtttgcggattttagttcgaatgctccccggaaattattcttttcccaaggcatggcacttcggttgggcactctccaaccgtctttgtcataatctccgtacgtattaatcctcataccgtttttcagcttaaaagatcccatttgcatgaactgtggagaagacgacagcccccagccatacccgtatccgaaaccggaaaaggcagaaggagaaaaagcatcagagaatccttgtgagtatgtggcatccgtattcagacggaacaattgattatagtctttactcatattcggcacatccaggctgaatttaggaagtttgggaggagctacattcatcaatcccatatccaataaaaagccgccaaactccttaatattagccgagggggcacgacgaatactatcggaagggatttctgactgtgcggatgcaaaaccgaccgataatatcagcgaaagaaataaaatcagttttttcatcttcgtaaaggttgatttatgacaaagatagaaattttcatcctgactattcgtttctgttatattttcttagagaaaaactctttaaaaataggatgacaacatttgtacatacgtttaagtagcaattaacgtggatacttcccgtttcaagtaacaaaagacatgacattgagcaaagttcgtatctttcctccctcattcataaaaaggaacgagggaggaaataccttttagcgtatggaagccttccatacattagcatactcttccagtacacgcttgatactctgcccgatttttacataatcagcttcgttcaagttggcaagtgatacacggacactccatttcggtccggcaaagccaccgccgttcagcaatacgagcgaagtctcatttgccaggcgaaagaccacatccaacggattatatgtcttttgcagataagcaacaaaatcatccccatagaattttttcgcccataccagcatatcaatttccgagtaatatccggcacgtagagggtcttctaccagtgtgaaacccgtattgtcccataatgcatgaaggcggcggtgaatgatttcctgcattctggttttgtaacggttttccttatccagaatagcaaaaagcgagaacaggctcatctgcatctgctgtggcagcgaaagacctgcggtatgattcaatgcgatctggcggctgtctgccaccatgcggtcaataaacttcagcttttccggatgcaaatcgatactggagtaacgtttgttcaagattgctttttgctcctccgacaggcgggcaatcattttgtcgtagatgttgtcttcgtgtagcgcgattacggcatttctccagcctgttgcaccgaaatatttggagaaagaataaacgcaaagagtattgtgaggcaattccgccattaatgaccggaaatgaggtataaatgttccatacacatcgtccgtaataatcatcaggttcggattatcatttttcacgatattgacaatccgtgcggcagtctccgggctaagcgcataactgggcggattgctcggattcgtaatgaagagcgctttaatctgcggatttttcagtttgtcaatctcttcatccttatattgccatgtatgtaatccgtcggctgtcatctgatcagcggatatttcagtcacgtcaaattgataacgtcgtagctgcgggatctctatataaggagtgaaaaccggaatcatcagtgcaatagaatctccctggttcaacaggaaattctcttccagcgaatcgaacaaataacacatggcggctgtgcctccttcggtggcgaacaaatcgaatgtccctttcggcggacgtcggtcacacatctcttgtgccagataatcctgtacgatctgttccgtaaaatacagaatacggtcgggcacaggatactggtcaccgatgacggattccgcccattcatgtaccagtgtgtccgggtcggcagcatgctccattagcatatagttgtaaccctctttcagcagattggcaccgggagccttctcattatctttcaggaacgcctcaaaacgggcagcgatccctgccttttgagggataccggcgattccttcttccagtgaaaacgcccggcgacattcacaaagtccgaattgtcccaacaggaaaaaagcttcacgtggttcggtagcaatccagttcggattaccccgtcctgcattcagcatggtatgtgctatcttctttacactctcatccgccatgtcaataagcttgtttttcagttcgaacggactgatcgtttccattttcctggcataacttttggtaatagccgggctattgtcttttttttccataatgaaatctatattagttagaatagtaaataagttgtcaaaagtattggtttcacgtttacatcagcaatacgataaatactccccagataatcagcagtgtgttgccgacagcatacgttacggtatatcctaaagccggggtctcactctccaccgcatcctgaacagctcccaatgcagcagtggtagtacgtgctcccgccgtacatcctaatgtcagtgcagggtggaatttgaacagatatttgcccattagtaacccgctgagaagaggaatggccgtagccaatgccccgataatgaacaagctgaaaccgacctctttaaatccggctacaaaactgggacctgcggcaatgccgactactgcaataaacatgttcaatcccacattattcaatacccagagtgaaggttcgggaatacctccgaaagtaggatgtttactgcgcagccaaccgaatatcagtcctgcaatcaatgcacctccactggtggaaagactgatagggacacctcccagatgcatagtcaacgcaccgacaaggccaccgaccagaataccgagtccgacaaaaatcatatctgtctgattcgtcggccgatcaacatatcccatttgtttagcggcagtttccacctcatgtttcattccggtaagttccagaatatcaccggcgtccaccactgtccgggcaagtaccgggacattgatacccgcacgtttgatactacggatactaaccccgtgcataaatttctgtgcccggattgtcgataccttttcgccggcgaaagtccggtgtgtcaccataaccggcagagtttccgccggaaagtccagtagttgcgcatcgatcacttccgggccgatccagtcttcttcgccaatcacaaattcgcgtcgtccgcttagtacgatctcatcctccggctgaagaagcatatccggtttgacctcttttacaactccccgttgccggactcgttctacaaataacagcttctcctgttcggatagatacttttccagttcactcaccttttttcctttgccaaaccatttatttctgatcttatacgcacggaacactaccggacgaagggcaggggagaatccgggttcatccatttctgaagtccccattttagattccagttctttacaatcagcttttactttatccaatccgccgagaagcttcggaccgagagaagccagaatccaggcagaaccagccgtaccgaaaatataagtgacggcataagacacaggaatggcattaatatatgttgccttctgtgcttcgctgatgcccaactggttgatcgtatcgcttgccacgccgataacggcagatatcgtttgtgagcctgccagcaatccgacagcctctccgatatgataccccataatcttggcaagtatccatggtgctaccagactgacgatacacatcaatacggcgaaccccacctgtggcagtccgtcttttttcagtccgcgaaagaattgcggacctaccttgtagccaacggcaaacaaaaagagtagaaaaaatacggcttttaacggaccgtctactgtaatgttcaattgtcctaccaatactcctaccagaaggacgctggtcactgtacctaaagagaatttccctattttcagtcttcccagccagaatcccgcgaaaagtgtgaggaagatagcaagttcagggtgtacccttagttgattgataatccattccataattaagttgttgttttaggttatgccaataacaacagttattgtacgcaaagagtttgttgcttcacgtagatttgttacttttgcactttcaaaataaaactaatcatatcctgtatgaaatcagacatagaaattgctcgcagcattgaattgaagaagataaagcaagttgccgaaagtatcggaatccctcgtgaagaagtagaaaattatggtcgctacatcgcaaagattcccgaacaactgattgatgaggagaaggtgaagaaaagtaacctcatcctggtaactgccattacagcaacaaaagcgggtatcggcaaaaccactgtatctatcggtctcgctttgggactcaataaaattggaaagaaagctatcgttgctttacgtgaaccctctctcggaccctgtttcggtatgaaaggcggtgcggccggaggaggatatgcccaagtgctccccatggaaaagattaatcttcatttcaccggagactttcatgctatcacttctgcgcataacatgatttccgctttgcttgataattatctttatcagaatcaggcgaaaggtttcggactgaaggaaatcctatggcgccgggtgcttgatgtgaacgaccgttctttgcgtagtattgtcgtaggtctggggccaaaatcaaacggtatcactcaagaatccggttttgatattactccggcgtcggagattatggctatcctttgtctttctaaagatgtggatgacttgcgccgccgtatcgaaaatatcctgttaggctttacatacgatgataaaccttttacagtcaaagatttgggagtggcgggagctatcaccgtactgttgaaagacgccattcatcccaacttagtgcagacgaccgaaggaaccgctgctttcgtacatggcggtccgttcgctaatatagctcacggatgtaactctattctggcaaccaagctggctatgtcattcggcgattatgtgattacggaagccggattcggtgccgacctcggtgcggagaagttctacaatatcaaatgccgtaagagcggactccaaccacgtctgactgtaatcgtggctacggcacagggactgaaaatgcatggtggtgtcagtctcgaccgcattaaagaaccgaatatggaaggattgaaagaaggattgcgcaatctggacaagcatgtccgtaatcttcgttctttcggtcaaacagtgattgtagctttcaataagtttgctacagatacagatgaagaaatggaactgttgcgcgagcattgcgagcagttaggcgtaggtttcgctatcaacaatgcattcactgaaggaggagagggcgcagtagatatggctcgcctggtggtagatactatcgaaaataatccgtccggttctctgcgttatacttacaaagaagaagacagcatacagcagaagattgaaaaggtagctaccaatatttatggagcaagcgttatcacatacagcagcattgcccgtaaccgcatcaaactgattgagaaaatgggaattacccattatccggtttgtattgcaaaaacacaatattctttctctgccgatcctaagatttatggtgcagtgaataatttcgagttccatatcaaagatatagtcattaataacggagctgaaatgattgttgcgatagccggagaaattctccgcatgccgggacttcctaaagaaccgcaggcgttgcacattgatattgtggatggagaaatagaaggtttgagctaaaaaacaatcggaccgcaggaatccctgcttcaatgagtaaatccccgtctttccttataaaccaatagggaaagacggggatgcttgtatatagagtccggtacacctttttatatctcttccggcgtaccgtacgattgaattcgtttttgttgaagagatattccatatcttttttttgtaataagaaaaacgaaattcctgacaaatagttcggatagcaaagttaataaatacaaaaagaggtctgtcctttttgaaaagaacagacctgataaattacagtatccgataatccgaatatcagacctaaaataaagtatgcctcttaataagcaaaaagaggatatttcttcattgtctcattgacacgtgcacgaacttgtgcgataacctcttcattgtctacgttggataacacagtctcaatcatttctgcgatttcaagcatcagatcttccttagcaccacgagttgtaatagctggagtccccagacgaataccggaagtctggaaagccgaacggctgtcgaacggaaccatattcttattaacggtaatatcagcagaaaccaatgctttctctgccactttacctgtcaaatcagggtatttgctacgcaagtcaaccagcatagagtgattgtcagtgccaccggaaacgatcgtaaaaccacggtcaatcaatgcctgtgcaagtacggcagcattcttttgtacttgttttgcatattccttgaattcaggttgcaggatttcgccgaaagccacagctttggcagcaatcacgtgttccagcggtccgccttggatacccgggaaaacagctgaatccagcagttgagacatcattttgatttcacccttcggagttttctttccccaaggattagggaaatctttgcccatcatgatgacaccaccacgaggcccgcgaagtgttttatgtgtagtagaagtgacgatatgtgcatatttaaccgggttttccagtactccggcagcaatcagaccggcagggtgagccatgtcgatcatcaggatagcacctactttgtctgcgatttcacgcatacgcttgtagtcccattcacgagagtaagcggaaccgccgccaatgatcattttcggtttttcgcgtagagcgacttcttccatttggtcgtagtcaacgcgtcctgtttccttattcagattatattcgcagggagtatagataataccggaagtatttactaatgaaccatgagaaaggtgcccgccatgtgcaagattcaatcccatgaatttgtcgcccggattcaggacagccagaaaaacggctgcgttagcctgtgctccggaatgcggctgtacgtttgcccattcggctccgaagatttctttcaggcggtcgatagcgatttgttcgctctggtctacaacttcacaacctccgtaatagcgtttgcccggataaccttctgcatacttgttagtcaggcaagaacccattgcctgcattacctggtcactcacaaagttttcagatgcaatcagctcgatacctttcagctgacgttggtgctctttttcgatgatgtcgaaaattaagtcgtctcttttcattcttttataataagattaaatttctaattcgagataccttattttaagcgtacaaagttaatgaaaataaataaaaaaagaaggaagtacaagaaaaatgttagtcaaaaatggaatttagtagaaaatggtcagaagataaaaccgagcgaaaaactcaaggcgctgtcgcggcggtcgaatataatccggctgattcctgtgctgccgtccgagttgatattgtcataggtaatagacttggagatatttccaattccctgctcgtagcggaaatcaaagaaaatacgggaaatattgactcccacgccaatcactgcacttatattaaacggatagagtttctcatggatacctttctggtcgaaattgctgaaagttatttcgttcttctttccccataaataacggagcttgggaccggcaaagatagacattccgtaaggacctttcttcactacgttatagccatacagaacaggaaagtcaatactgtgcaatacagattgaaccgaagcataatccggctcgatagccggatgttgagaacccagtttatcgaatgtaatctcgcatttggttacattgtatgacacttccggttggatataatgtttcttcatattgatacgcatgaagagagcaccgaaatagccgattttataattattctgcacctcgtcgatagtcacatctttgattttcaactcggaaaccataaacatggaggaattgaaccctgccctgacaccgaagtttattttcttcgtattgggacggtccactttgtctgcggtattccgattctgtccgaaaaccgtaccggctaccgtcatcaaaccgaaaaatagtattttacgcagcatattcatggttatacaatcctttgtctttatgattttttcttttcaacactccaaccgaattttccgattttttctcccagaccatagtatcctccgtgaacatataccagaggattagcttccgccagttcgagcttcccagtctcaggattcagattccggtcgtcggcacgtacatttactacatctgctataaacatatcatgcgaaccgagagatacgatctcttttacgcggcattcgatgcagaggggagattcctcaatcaaaggcgcactgactacggtgcactgccccggggttagcttcatctcgtcaaacttatgataatcgcgtcctgaacgaactccgcaccagtcggtggcgaaagccatgtcttttgtcgtcagattaatgacaaactccatattccgcttgataatctcataagaatgtcgttccgggcgtacggatatatagcacatgggcgggtttgtgcaaatcgtacccgtccatgctacagtgataatattatattcactttcttcttttccgcaactgaccagcacagccggcagcggataaatcatcgttcctggtttccagtcctgtttcacttctttattggaaaaatgaaaattaaagaatggtgatttcctcacgtttctgttccttctcgcaataatggcattttacgatgcaattatccttgtctgtcacatggaataacgtagccattggctcattgttcgtgatacatttcgggttcgcgcatttcacgattccgcgaagttcatccggcattcttacttctttcttttccactacctcgtagtcgcggataatgttcagtttcacattcggagccacaaccgaaatacggttgatttcttcatcgcagaaaaacttgtccgcgatcttgataatccccttctttcccagcttcttgctgtcgaggttgaaaccgatagtgatattgcttgtcatttgctccacgccgagcagttgcactacggtaaagagcttttcagaagggatatggtcaatcactgtcccgtttttcagggcggctacttgcaatgcttgtttattttcgctcataataaaatatcgtttttaacgtcctctaatgtgatacctaatacgtcgcaaagaatggcttcacgggcatacagaccattttgtgcctgttggaaataatatgccttcgggttatcgtccacatcatatgcaatctcgttgacacggggtagcggatgcagaatgcgcaggttcgggcgggtattttccaacatcttgttgcgcaggatataaacgtttttcacccgttcatattccattaggtcggtgaagcgttcacgttgcacacgggtcatatacaggatatctgcatctgcaatgatttcttcgctgaaatccgtgtgttccacatattttatctggtgcgttttacaatagagtttgtattcttccggcattttcagttcatcgggagcgatgaagtggaaagtggggttgaagtgacgcattgccattaacagggagtgcacggtacgcccgtatttcaagtcacctaccaggaaaatattcaggttttccagcgtgccttgcgttttgtagatagagtatagatcgagcattgtctgtgacggatgttggttcgctccgtctccggcattgacaatgggcacaggagcgacttcacttgcatagcgggcagctccttccagatagtgacgcatgacgataatatctgcataattgctcaccatcataatcgtgtcttttagtgtttccccctttgacgagctggtagctttggggtcggagaatccgatcacacgtgctcctagacgattggcggctgtttcaaaactcaggcgggtgcgggtggaaggttcgaagaacagggttgctactacctttccttgcaataaccggcggttggggttcatttcaaactgcttcgccatttcgagcatgtagaggattttttctttagaatgttcggcaatggttactaaacttctgttttccattttgttatattttatgtggatagaacttgttttaccggagcgtaaaggtacgaagaatttgtgaatagcacagattttttcgtacctttttttatcattcggcgtttatttctgcttgttggtcaatgcggcaatgatatactttcccggtgccccgatcttgccccacgtcgtattgctgaacagcctccatatctgcgtgccttttctaccgtaatccgacaacttcataattgcctgcttttctttcagatccgtcactttatggcgttccaggctttccagcagtccggttacgttgtgtgtagtctgattgtaagcataccccggaatttcaaacgaagcattacttgtttcttcctcctcagaagatagtttattttggtttggtttagtttgtccggaaatgtcctcattttccggattcacctccgcgtcagttttaaaaatgtctgcatcttttttattcgtgcctcctttttgtttaccatttcctggccgggcttccaacaaataaggtaatttagagaaatcaatctttcttcgtacagtagcttccagccagactttctgaatctgctctgaggtcaggaccccatatttctcataaatatctttattgaaaaattccttttccagcagtaactctataattttctccattacttcctctttaatacctccgcctactttacggacgaagataagactctgttcttttccccaagaaatataatacccttctttatagattttgcagagtagtctcatgacaatataagaggataagattccgaatttagcttctaacagttccattatttcttcgtcgaaaaaatttgcaggtgtggggaaataggggattcctttattaatcatactcatagttcaatattttttattaaatgttatacaatcgctttccattccaacaggtttccgatcataaaccgtctccacgcgtgttgctccatactccagtagaccacagacatctgtcgggaagtgatcttgaactcccggtgaaaatctttttcatatccaaccaaggttccttgttccatacagaatgtgccgtcttgcttatggaaagcaatcatggcatttccatataacattcgttcaataagctctatacagctttgcacagttttttctgcgcatttttccgaaatacccttttcggcggcaatacgttttttccatactaacttgcaggcttctaacttgcttttgtctatttttcttttcatcttttttcttctgtttttttaatatttgtttttttacgaataaaatctccccttcaggatagtgacggtatatgattattatagggtcgctatcctttcattatagtgatactgtttaattgttatagcgtcactatttttgaagatagatatacgttgtctttagtcggctagaaacggctgcgaaagtatatcttttgtttcttctgcacaattatttttgtcaacgcttattctctactctcttttttacttgtttttcttcctcttcttttcgttctcgttcctcttgcctgatgttacataactttgtttctatactgctaatttctaacaatttaaacccgccatgtttagctatatataagctctccgtttcgtagatatattcagctaagtcttttagttttttagagcatctgacgtgtacttcccctctttcgaatttgtgcaaataaacagtgagaagttccgtttcatctccggttaatcctgtcctgttttcgagttcctcccaactgatgatttcccctttcacatgtcttctagtgttctttttccgtttttggaccttcttttttacttgtacttttttctcttgttgatttgtttttttctttgccatagtttgctaatttttgcaatggttaaataatttaaataataaattatactttggcaagcgtgcaacgaacctgcaaaaagatttgtttttttgctgcatgccaaatggtatatattataaaataactagtgatgcaaatgatgagtaaaaatggatttagccggtgtggagagatctacatcggtcgtttgcgaaaggaagggcgttattctacggcgcatgtctacaaaaatgccctcctttctttcagcctgttctgcggcacgttcaatgtgtcgttcaggcaagtaacccgggaacgtttacgacgttacggacagtatctttatgaatgtgggttgaagcccaacaccgtttccacgtatatgcgtatgcttcgcagtatctacaatcggggagtggaagcgggtagtgctccttacgtcccccgcctgtttcacgatgtctatacgggtgtggatgtccgtcagaagaaggcccttcctgttgccgagttgcgaaagctgctttatgaagatccccaatcggaacgtttacgccatacacaggctattgccgctctgatgttccagttttgcggaatgtcgtttgccgacttggctcatttggaaaagtcagctttggaccggaacgtgttgcggtacaaccgtgtcaagacgaaaactccgatcagtgtggaagtgctggataccgcgaaggagatgattcaccggcttcgcaacagtcagccttcccgccctgattgtccggactatctgtttgatatcctgtccggtgataagaaacgtaaggatgaaggagcttaccgtgaataccagagtgctcttcgtcgatttaataattgtttgaaggatctggctcgggctctccgtttgaattctcctgtcacttcctacacgctccgtcattcttgggcaacgacagccaaatatcgcggagtgccgattgaaatgattagtgaatcattgggacacaaatctataaaaaccacacaaatctacctgaaaggcttcgagcttaaagaacgtacagaggtaaataaagggaatttatcttacataaagaattgttatgtaggtaaataaaaagatgtaatgagttaataatcagaattaaagtgtatctgttacttcttaggtaacagaattaaatttgacgcaaagatagacatattttaagatagtaaacaaatattttcccattttttttcgttttatctgaaacatagggcaaaaaagtatttgaacatgaaatctcttttttcatgctcaatgattttttattgcccgaaatcaagaaatcttctcgttgaatatcaggcccccttcttttacaccctgtatatcagtgtaatttccctttttcattgttgtgtgtgtcttgtgtatatactgcctgttacctaagaagtaacagatatacatggggtaaaaaaatatgattttaacgaaacaaaaatcagcaaatgctgggcctagtaatgggacaggggaaggcgtagcatactcaaaacgttggtatgtcgctttggttcgcatgcatcacgagaagaaagtagccgagcgtttaaataaaatggggattgagaatttcgttccggttcagcaggaacttcatcaatggagtgaccgacgcaagatggtcgagtctgtattgcttccaatgatggtattcgtacacgttgatgcaaaagaacgtaaagaagttctttccttttctacagtaagtcggtatatggtaatgcgaggtgagagcagtccgactatcattcctgatgagcagatggctcgtttccgatttatgcttgattattcaaaagatgtcatttccatgaacagtgctcccttggcgcgtggtgaaaaagttcgcgtcattaaaggtcctttaaccggacttgtgggtgaacttgttacagtagacggcaaaagcaagatagctgttaggcttaatatgttaggatgtgcttgtgctgatatgccggtagggtatgtagaaccggttagattttgaatatgtacttgtatttctgatacattattttattcatttatactacaatggaaaaaacattgaagggcatagtacaatatgctcgtaaaaactatttcagctattgggctattcttgggattgacacagcactgtctgttttatgttcattactcgcctatgctgtaattcactacatggcatacgtcccgatgagtgactggatactttgcaaatttatttgcgtgtctttggtgtcaagtgttgcaggagccttattattccatacttatcgaaatacgatccgtttctctcaagcacgagagttatggcgtattatgtgtgccgtattattcaagatagcctgtttgtcggttattgcgtattgggtaatctatgagactgaattaccggataattataggatatcttatcttttgtttgatggtttattaactctggtaacattaactgtttttcgtgtatctcttataatcatatatgattttttattggattgggtaaataaaaagaatactcgtattcttatttatgggattgatgaaaaaagtgtagccttaaaacttcgtcttcgtgatagtgcgcattataaggttgtaggtttttatatttatggtaaaaataatcgtagacgtcgattggcagatcttcctatttattattttgaaacagaagaagactttaattatgtcataaaaaaacatggtattcatggcattttatttgctcgttatgaagatacccgcttggaggagaatcgccttttagagtattgtaaaagtaatgctgtcaagacttttattgctcctactatcagtgaagcggattctgacgggaactttcatcagtggatacgtcctattaaaattgaagatttattgggacgtgccgaaatcaatataaaccttagtcaggtcgcagaagaattcagaggaaaagttgtattagtgaccggtgctgcaggtagtatcggtagcgagctttgccgtcaattggtgcaaatgggtattcaaaaactcatcatgtttgactctgcagagactcctttgcataatgtccgtttggaatttgagaaaaattatcctgctatcgattttgttccggtgattggtgatgtacgtgtgaaagaacgtgtgcgtatggtattcgaactttatcatcctcaaattgtcttccacgccgctgcttataaacatgttcctttaatggaagaaaatccttgcgaagctgtacttgtcaatgtcacgggttcgcgtcaggtcgccgatatggcggtggagtatggtgcagaaaaaatgataatggtttctaccgacaaagctgtgaacccgactaatgtgatgggatgttccaaacgtttggcggaaatctatgtacagagcttggggtgtgctatccgtgagggaaagataaaaggacatactaaatttattactacacgttttggaaacgtattaggcagtaacggttctgtaatcccgcgcttcaaggaacagattgagaacggtggtcctgtcacagtgactcaccctgatattattcgtttttttatgacgattcccgaagcttgtcgtttggttatggaggctgttacaatgggagagggtaatgaaatctttgtctttgaaatgggcaaggccgttaagattgtcgacttggctacccgtatgattgaattggcgggttatcgcccggatgaagatataaagattgaatttactggcttgcgaccgggtgagaaactctatgaagaagtgctgagtgataaagaaaatacgattcctaccgagaataaaaaaattatgatagctaaagtacgtcggtatgaatatgctgatattcttgatatatatgcggagtttgagaagttgtcccgtgctgtgcggattatggacacggtcagattgatgaaaaaagttgttccggagttcaaatcgaagaattcgaaatttgaggtactggataaagaataataaacttgagaaatttatgtataatttgttttgtatttgtgcaagtagagtaagtagaaaggggaggggagtatttccctgtttagttgcgatattgctgttcgcttcctgccagtcgtataagaaagttccttatttacaagatgcaaaagttgtagaacagactgctcaacaggaaaatctatatgatgcaaagataatgcctaaagatctgcttactattgtagtgtcatgtaccagcccggaattggctgttccgtttaaccttacggtagctactcaaaataatgtagctataaccagtacaacctcccaaccgatattgcagcaatatctcgtagataacgagggaaaaataaattttccggtactaggtgagttgagggtaggtggcttgaccaagaaagaggcggagcaactgattgtggagaaactgaaaccttatatcaaagaaacgccgatagtcactgtccgtatggtaaactataaaatctccgtattgggtgaggttgcccgtccgggaacttttactatcagtaacgagaaagtgaatttgttggaagcgcttgctatggcgggtgacatgacggtttggggagttcgcgacaatgtaaagctgattcgtgaaagtgctgatggtaaacaggaaattataacactggatttgaacagtgcggagaccattctttctccctattattggttgcagcagaacgatatcgtttatgtgactccgaacaaggcaaaagcacgcaactcggatattggtaacagtacaagcctctggttctccgctacctctattttagtgtcattggcaagtttattagtaacaattttcagataatagcattgtatgattgatgaaagaaaagataaattaggggaacagtctgaagaacaggttaatattcaggaacttcttttccgttatctgattcactggccttggtttgtaatatcgataattatttgtattgcttgtgcatggggatacctacgtctgacaacacctatatataatatttctgccactgtccttattaaggacgaaaagaaaggtggtggtgcaagtatgtcttccgatttagaaaagatgggattggagggtttcgtctcttcatctagcaatgtagataatgaaatcgaagtacttcgttcaaagtctttggccagagaggtggtaaacaatctgggactgttcgtgacttatatggatgaagacgaatttccaagcaaagagctttatcatacatctcctgttttagtgagtctgactcatcaggaagcggataaacttccgggtagaatggaaataaatatgattcttcaaccaacgggtgcgttgggggtacaaattacagtaggcgaaaaagagtaccggaaacagtttgataaattgcctgctgtatttccgacagatgagggtacggttgcttttttcgcaaataacgataccttgtcagcagtttgtccggaaaatataaccaaagaacgtcatatcacagcttttattaacagacctttttctgtgttgaaagaatatgttaactctttgtcaatagcccccacttcaaagactacttctgtagttgttatttcattggaaaatacaaatactcgacgtggtagagattatatcaataaactgcttgaaatgtataatatcaatgccaataatgacaagaatgaggtggctcagaaaactgctgaatttattgacgaacgtattggtattatttctaaagaattaggcagtacagaacaggatttggagaacttcaaacgtagtgcggggattactgatttgagcagtgaagcacagatagccttgacaggcaatgcagaatatgaaaagaaacgcgtggaaaatcagactcagataaatctggtgatggacttgcaacgctatatgaaaggtaatgaatatgaagtattaccgagtaatatcggcttacaggatgcagcatcagccggtgcgatagaccgttataatcaaatgctggttgaaaggaaacgtctgttgcgtacttcgacggagaataatccgaccataatcaatctggataccagtattcgtgcaatgagaaccaatgtgcaagctaccttagatgctacattgaaaggattgcagattaccaaagaagatctggctcgtgaagcaagccgttattcccgccgtatcaatgatgcgcccactcaggaacgccaatttgtgagcattgcccgccagcaagagattaaatcgggtttgtatctgatgttgcttcaaaaacgtgaggagaatgccatcactttggcggctactgccaataacgcgaagattattgatgaagcgttagcagatgacaatccgatttctcccaagaagacgatagtttatttggctgctttagtcttaggtgtgggacttccggtaggagttatttatctgataggtttgacaaaattcaagattgaaggtcgtgctgacgttgagaaattgacttcacttcctgttgttggtgatattccgttagcagatgaaaagactggttctatagcggtatttgagaatcagaataatctgatgagtgagactttccggaatgtccgtactaatctccagtttatgcttgagaatggtaagaatgtaattctggtaacttctactatcagtggtgaaggtaagtctttcatatctgctaatttagcaattagtctttctttattagggaagaaagtggtgatagtaggactggatattcgtaaaccggggttgaataaagtcttcaatatacctaaaaaggaacatggtattactcaatatctgacaaacacaactgcgaatttaatggattttgtgcagccttctgatataaacaagaatctgtttattcttcccggtggtacagttccacctaatccgacagaattattggctcgtggagggttagagaaagccattgaaacattgaaggcgaattttgattatgtgatattggatacagcgccggtgggtatggtaaccgatactttacttataggacgtgtcgcagatttatccgtatatgtatgtcgtgctgattatacccataaggcagagtttactttgattaatgaattggctgaaaataacaaattgcctaatctctgtattgctgtcaatggtttggatctgaacagtaggaagtatggttattactatggctatggaaaatatggcaagtattatggttatggaaaacgttacggttatggttacggatatggagagaagcatggaggtgaaaaataattaaatcttgttaccactttggatggcaaatcagcatacgctgatgctgactttgtagtgattgcagctcctacaaattatgccccagtaaagaactacttcgacacgagtcatgtggagaaagttatcgaccttgtacttgaggtgaatcccgatgcggtgatggtgatcaagagtactatccctgttggtttgtgcggtcactttatgtgaagtacgttcagaagggtgcagagaaactgaatttgctgttttcaccagaattccttcgtgagagtaaggcattgtatgataacttgtatcctagtcgtattatcgttggttttccaaaattgatgaggggtcagtcagcagaaaatgttgcgatccaaaagcttactaatattgatgctatggaagaggcagctcatacatttgcgaagttgcttcatgagggcgctatcaaagaagatattgatactttgtatatgggggcaaaggaagcggaggctgtaaagctctttgcaaatacttatcttgctcttcgtgtatcttactttaatgagctggatacttatgctgaggttaagggattggacagtaaggcaatcattgatggtataggacttgatccacgcattggtacacactataataacccttcctttggttatggaggatattgcctgcctaaagataccaagcagcttttagcaaactatgcagatgttcctcagaacatgatgtctgctattgttgaatcaaataaaactcgcaaagacttcatcgctgatgaggtattgcgtaaggcaggttggtatgattatagtaccgataatcagtatgatggcagtaaggagcctgtaactgtaggtgtattccgcttgaccatgaaaagtaattcggacaatttccgccagagtgccattcaaggtatcatgaagtgtgtgaaggccaaaggtgctaatgtgatcatttatgaacctacacttcaagatggtgatttgttctttggcagtaagattgttaataacctcgatgaatttaagaaattgagtaatgctattattacaaatcgctatgataatgttcttgatgatgttgaggaaaaagtatatactcgtgatctctttagacgcgattagattagatatttctgacagcataagtggagcgcttgcttgacgttcaataagtcctgccagaacatgagattcaatagttaaatacattataaattatgagtattttcaaagacaagaccctgatgattacaggtggtaccggttcattcggtaatgcagtattaaatcgttttcttcgcactgatattggcgaaatccgaatcttttcacgtgatgagaagaagcaggatgatatgcgtcatgagtatcaagtaaagtatcccgatgtagcacataaaattaaattttttattggtgatatacgtaacctgcagtcttgtcgcaatgcaatgcctggagttgactatattttccatgctgctgcattgaagcaagttccttcatgtgagttcttccctatggaggctgttaagactaatgtgattggtactgacaacgttcttacagctgctatcgaggccaaggttggtgccgttatctgtctttctacagataaggcagcttaccctatcaatgcaatgggaattactaaggccattgaggaaaagattgccgtagctaagtctcgttactctggtgatacaaagatttgttgtacacgttatggtaacgtaatgtgttctcgtggttctgtaattcctttgtggattgatcagattcgtaacggacactctgttactctgacagaacctaatatgactcgttttattatgagtttggaagaggcagttgaccttgtactcttcgcttttgaaaacggtcagaatggagatattctagttcaaaaggcaccagcttgtactattcaaactcaagcagaagcagtatgcgaactatttggaggtaagaaagaagatatccgtgtgattggtatccgtcatggagagaaaatatatgaaacattgcttacaaatgaagaatgtgctaaggctgaggatatgggggacttctaccgagtacccgcagataataggacacttaactatgataagtatttttcagaaggagacgagaatagagtaacattgacggagttcaattctgaaaatacaaagcgacttaacttggaagaaacaaaggctaaaattgcttctttggaatatatccagaatgaactcaagggacttgacaatatcgcaaagtaatcacttagccaatttaactttataaaatggatatcaaacattttcaagataatggtaagcttaggttgttgattatcgtcggcacacgacctgaaattattcgtcttgctgcagtcattaataagtgcagaaaatattttgacgtacttttggcacatactggccagaattatgattataatctcaatggggtattctttaaggacctaaaacttgctgatccagagatttatatggaagctgtgggtgaagatcttggggcaaccatgggtaatatcatcgataagagcttcaaggtaatggttgaaaccaagcctgatgcagtccttgtcttgggtgatacaaatagctgcttaagcgtaattggtgcaaagcgccttcacattcctatttttcatatggaggccggaaatcgctgtaaggatgaatgtttaccggaagaaacaaatcgtagaatcgtggatattatctctgatgtaaatatggcttatagcgagcatgctcgtagatatttggatgatacaggtcttccaaaggagcgtacatacgttactggttctccaatggctgaggtgttgcatcagaacttggctgatatagaggctagtgatgtgcaccagcgacttggtctgattaagggtaggtacatccttctatctgctcatcgtgaggaaaatattgatacagaaaagaactttacttctctcttttctgctatcaataaaatggcagagaaatatgatatgccgattctttacagttgccacccacgttcacgtaagcgattagagaatactggctttaaattggatgaacgtgtaattatgcatgagcctctcggctttcacgattacaattgcctccaaatgaatgcttttgcagttgtgtcagattcaggtacattacctgaagaatcttcatttttcacaagcgtaggacatcctttccctgctatttgcatacgaacctcaacagaacgtcctgaatcattggataaggcgggcttcatcctctccggtatcgatgagaatggtttgctacaggcagttgctacagcagtagaactcgttaaggatggagactatggtacgcctgtaccagtatatacagatgaaaatgtaagcacaaaagttgtgaagattattcagtcatacgttggtgttgtcaacaagatggtatggcgcaaagatatttaaaaaatatggattagcaggtacacagatggaacttttgttcgtggctcaataccactacctgctgcaaaataaaactgaaaataatgagaattctagtaactggtgcaaagggttttgttggaaagaatctttgctctcaattaaaaaatataaaagaaggtaaggctcgtttttatggcgatcttataattgatgcagtttatgaatacgatcttgattcaactctgggggagttggatcaatggtgtgccgattgtgactttgtatttaatcttgcaggtgtaaatcgtccaaaagatccagaggagtttatgaaagggaactttggctttgcaaccatattgctaaacacgcttaaagctcataaaaacaattgtcctgtgatgatcagtagttctattcaggcaactcttgctgggcgtttcggtaatagtgaatatggccgcagcaagaaggctggtgaggaactgatgtttgaatatgagaaagagacaggttctccagtactcgtttatcgtttccctaatcttttcggtaaatggtgccgtccaaattacaactctgcagtagctacattctgtaacaatatagccaatgatttgccaattcaggtaaatgatcctaatgtagatatggagctcctttatgtagatgatctagtagatgagatgattgctgcgctcaaaggagaaagtcatcgttgcgagtttgacggtgtggaaactgttcaaactgctgatggtcgttattgctatgtaccaactactcataatgttaaattgggcgatatcgtggatttactccattcttttgcggagatgcctaagacattgatgattccagagattcctaccaactcatttgcaaagaaactctatagtacttatctcagttatttacctaaggagaaggctatctttgatttgaaaatgaataaggatgatcgtggttcttttacagaactcattcacacattaaattgtggtcaggttagtattaacatctctaaaccaggtataactaaaggtcagcattggcatcatacaaagtgggagcaatttatagtagtaagtggtcatggattgattcagcttcgcaatgagaacgttgttgatggagaaattattaattatgaggttagtggagataacattcaaagcgttattatgttgcctggttacactcataatattattaatctctcagagtcagagaatttggttactgtgatgtattgtaacgagatcttcgattcaaatcgtcctgatacattctttgatcccgtattaaagttgaattaattattaatattagaattttgatgtttcatactttacttcttatttaacagtctcaattttactgttataaagcttttgatacttttagaatcagtaattttagtagaatcattcgatacgaattatgattaatatttcaaaaaagaaagactgttgtggctgtaatgcttgtggggatgtttgtcctaagcattcaatcacttttaaaattgataaagaaggattttggtacccagaagtagaaatggatacttgtatcgattgtcatctatgtgagaaggtgtgtccgttattgaataaagaagaatacaaaaatattgatggctatgtgaagcctaaaacgtatgctcttgtacacaaaaatatcgaagttcgttttgatagtacatctggtggagcctttacagctttagctgaagaagtatataagcaaggaggctttgtcggtggtgctatttataatgaagattggtctgtttctcaatttctttcttcctcaaaaaatgatcttcccaaattgcgttcaagcaaatatttgcaaagtcattttgatggtttctataaatcggtaaaagaagcattaaaaacagaaaaacctgttttagtttgcggatcaccttgtcaaatggcagccatgtttaggtatctaaagaaaccatatgaaaaccttatcatagttgattatatctgtcgtggcatagcttcacctatgtattttagaaaatggataaactatttagaaaataaacataattctaaagttatcttttacaaggcaaagagtaaggaacttggttggcgtaaattatcaactcgaattgaatatgcaaatggagaagctgatgttattgctggtcatgacaatccatggcttatgatgcaatataaagttcctgagatttgtagacctagctgttttgagtgttcttttaaaggttttccaaggacttcagatattacaatgggggatttatgggcaaaaaaaggttctataccgcaaaatttggatggagatttgggcacatcgattgtttttgcaaataatgcaaaaggagaagcttttttgtctcgttgttttaagaaagtggaatataaagaattcccttttgaaacagctgtaaaaggtaattttcatttagaaaatgcagtaaggcattcatcttacgatagagaaactttttttcaagacttaaatgagtcttttgaagaatgtatagataagtatattccggagtttaatcatcaacaatattctgtaaaaagtaaaactaagaatttcttgaagtttgtttggaaaatatcatctgcatctggttggagtatttctacttggagaaaaaatttatggtacaatatattttcgagtaaagttaaaacttctatatttaaagggcattattttataattgaaaaaaactgtacgattcaaattaattcaaaaggtcggttaattttagattccgctttatattttggaacaaaaaaagttaaaggctcaatattagatagtagactcctaatcgagagcggaggtattatgcgtatttatggaggtgattactcaatctcttacggagctgatatagaagtttttagaaacgcattattagaaattggaggtggagttggtgcaaatataggtcttacaatagtatgtggtgacaaaatcaaaattggtaaaaattctggttgtggccgtaatgttactatacgtgataataatggaggtcatgccatatctatcagaggttataaaaattctctaccaatcactataaacgaacatgtatggttgacagaaaattgtacagtaatgccaggctcaattattgaaactggagcgattataggcgctcgttctgttgtttcaggacatatacctgggagctgtatagttagcggagatcccgcaaaagttgtagaaaaaaatatttattggaaattataaatttattataatatggaactaagtgaatttattagcaagtttgctgatcagtttgtggatgaggatgcatctgcttttacagccgatacagattttcatgagttagatagttggtcttcattgacaagtcttagtgttgtagctatgattattcaggaatacggagttgaacttgacagtttagatgttcgtaatgctgatacaattgaagaattatttgaaattgttaagtctcgaattaaatgaaaaccactatttctaacgtcgaaatcaaaagtttagcaacttggttgccatctaacaagattgacttgatgtcattttgtgatagatttcctgaaaagaatgtaagggatgtaataaaggcttcaggagcagaaacagtatatagaacttctgaaggccaaaaagcttcagatgtatgttttaatgccgctgaatttctcttagataaagaaaacatagataggtcaactattgatggcctcgtattcgtttcatcgactcgtgattggattattccagatactgctgtatctttgcagcatcgtttggggttatctacggatactgtttgtcaagatataaattatggctgtgcaggatacgtatatggtattttgcaggcttcagcatggattaattgtggtctctgcaaaaatgttttggttttagctagtgaggttctttctccatatttaaatcctgaaaatgtaggtagtattgaaactggcgaagcaggaactgcaaccattatctctaaaggaatttcacattttagttttgagatttcatctaatggagctaagtctggggtaattcaacttccttatgatggttatcttcaacaagatggtatgactgtatttacttatggtatcgtaaatgctaagaaaagtattcttgaaattatggaactagaagggtggaatgaaaatgacgttgagttatatgctcttcatcagtctaatcagatgataataaaaaatgttcgtatgggattgaaatccactccagaaaagtttccaaccaacatgaaagaatttggaaatacgggatgtgcttcaataccgcttttactaagtgatttatatggtactcataacaagaaacaaccttcaaatgccatattgtgtgcatttggagttggtttaacttgtgctagtgtttcagtggattttagtaaaacaaagatctatgaaccagtaaatagatgtttgtaatatttataattgaattattgcaatagttttttatatgaaaataaatcttattgagttttttgtaaagacagtagcagaaaactcacaaaagacagctgtggttgatggagctaaaaccatcacttttggtgagcttgatttcaaggcaagattattagcatatttgcttctttctgagtgtaattgtcagaactcaccagttgctttatatttgcctaagagcattaatgctgttgttggtgatattgctattacatatagtggaaatacttatatgaaccttgatataaagaatcctgcagagcgaatttctaacattctttatttaatacagccaaaagcgattattacaaataatgtttattataaaaaaattcgtgagatagcttcggattcaattaaaattataaatattgatgaactttctgaggaaaacatacctgaacaggaatatttcataagtaagttgagtaatatcattgattgtgatccttattgtattatcaatacttctggttcaacaggaaccccaaagggtgttgttttgaatcacaagagtttcattgatttcatggcacagacatttggagaatacaatttcaatgcaactgatgttattggttcgctttctcctgttatctttgatatttggagctacgaactttgcttgttgatgggagttggtgcttcaattgttgttattccagatacctactctgcattccctataaagatattgcaactaatgcaacagaataatgtttcatacatcttctgggttccaacaatcatggtaaacattgcaaatatgggattgctttcacaggttgagttaccttctcttcgtgtatgttggtttgccggcgaggtattcccaaccaagcagtttaatatttggcgacacaccttgcctcaggttaagttttgtaattactatggccctatagaaattacattggattgcgtttattacaatatagagcgcgagataccagatgacgaaccattaccaattggcaaagcattccgtaatactgatattctcattcttgacgaaggaaataataaaataatagacgccaataaggaaggtgaactttgtgttagagggacatctttagccatggggtactacaataatccagaaaagacagctgctgcctttgttcagaaccctttgaatcactcttatccagaaaccatctatcgtacaggtgatttggtattcatcaacaaccatggtgaaatcgtttttaaaggccgaaaagatagtttgattaagcatatgggatatcgtattgaactcggtgaaattgaacatgttatcattaataccttaaagttggttaagaatggttgtgtcgtatataaccatcaacgcaaggagattactttgtactatgaagcagtgaacgaacttacagctgccgaatttagaaaggctataggtaatgctcttccaaagtatatgatacctgttgtttatcatcatttagatgaacttaagcgtaatccaaatggtaaaatagatagattgtattacagtaaaatagttgaataataatggataagattgtaagtatagagcaactgcaagaacttattataaatataagaaaccttagaaagggttttttgactaatttctatcttgataaatttaagcattctatatggatagaaaaaggggcattgttctatattttgattgatgagactctcttttttctgaaaaaagatattggcttctccaatttgttttattgtagcacgatagttgagaacttatctcgttcgttacatctgttattaagctcttattctgaaactcgattcatgattgacgcggtgggaacatctgaacaatgtcaaaccattcaaacaatgctttctaattgtcaatttaacgaatataataaacttattagaatgtctcgaatgacgcctcaggatgatacttttgttcttaatgataaggttgagataggttcaattgaggatgcaaatcaagtgcgtgaattactcctaatgaattttgatattaaatgtgagcagattccataccaagaagaaattgatcagtatgctaaagataaaagaatcttggtgtataaagaaaatagtgaagtttatggcttcgtaatttttgaatcaaatagatcaactcattatcttagatattggtttgttcatcctgaacatcgagataaaaaaatcggctcaatgttgttaaatagatttttctatgaaggaaataatacaagaagacaactattttgggttattacaaataatgaaaatgcaattaagcgctatcgtcattacggttttcaagaagaagacttatatgatatagttttatcaaataaataaaaatattatgaaagaaaaaattattaagatccttacggaacttcgtcctgagtttgattttactgatgagagtttcaactttatcgaagaaggtatgttagattcttttgatgttgtatctctggttgattctcttgatacagagtttaatattgtaattgatggtgttgatatattaccagaaaatttctgttctgttgatagtataaaatcgttgttgaaaaaaagtggagttgctgagtaaactcttatggcgcttgaaattataaggattatcaatagaccaatagattcaaattgttatatcatttttgatgaatctataaataatgaatgtgttataatagatcctggatctgaaaaaatagataatttaataaacttaattaatgaattatctctaaatcctagatttataatattgacacacgaacattatgatcattgctggggtgtaaatgatttaagggcaaaatttccccacattaaattaatatgctcttcctattgttcatcagccattcaaaatactaagctaacgtattctcactattattgtaaacctgagtttactattaaacccgcggacattatagtagaagatgtagagggtaaaataagttggaatgattacttgataacatgttcccaagcgaagggtcattcattatcgagtatcttcatttttattagaagtgctatttttactggggatacacttataatgaactcaaaaacaattacaaggttcaaaacaggctctaaatctgatttggaaaatacacttcaaaaaatgttatcgtataaaggaaaaggtttcttggttcaccctggtcatggagaaatatttcctttggatgtttatgatctttcaaatgcagtcgaataagtgtataaatataaaatgtataaataaaaatggattactttgaattatccaatggcgcaaaaattccctgtttaggtacaggaccttctgctgtttataggagaatgaatgatataaactataaatggaaatggataagtgatattcctttaataggtagacttctttatcgaataatatatatcttcaaaaggcagaaagtcagccgtcaatgggtcgatgttctgtctgagagtttaaaggtaggtaatagacttattgactattctaattcttacggagatggtaatttgttaggtcaggcaattataaagagtggaatagacagaaaagaactctttatagtctcaagagcatctaattcaagtcagtttattcattctgtgagggaagaatttttgaagtctttatccaatatggaattagaatatgttgatttatacatgtttcattggcctgttccaagccatttcatagaaacctacaaagagatagaaaaactctataatgaaggtttagtaaaaaatatcggaatatgtaattgccaccaacatcatattgaagccatattaagggagtgtgaaataaaacctgttgttaatgagtttgaagtacatccattattcacgcaaaaacctcttgttaaatactgcgaagataaaggtattcgtgtaatagcttacactcctttagctattaatgattatcgtttgaggaatagtaaaattttacgtggtatagctaataaatataataaaaatatttatcagattgtccttcgttggcatatacagaatggtataattcccataccttattcatttaatcccaagcataataagtcaaaccttgatgtttttgattttgagttaactgatgatgaaatgaaggttatagatggatttaattataacagcagacttcgctatgacccagataattgtgatttttccatattataataatcgcaagaatggcatcaggtaataagacaatagcaaaaaacactgtattcctttatattcgcacgtttattacaatgatcatttcgttgtatacgtcacgtgtgattctacaagtgttgggtattaatgattttggaatatatcaagctgttggtggtattgtaggtttattgtcttttttaaatagtgctcttagtgctggcacatcgcggtttttgacttacgaattaggtacgggtaacaaagaaaagctaaaaaatactttttcaacgaccttaacagttcatataattttgtcattaatcatagtactcctcggtgaaactttgggactttggtattttaataccaaaatggtgatatcggcggatcgttttagtgctgcagcatgggtatttcatctatctatgcttacggctattattagcatcgttagcgtaccgttcaattcagcaataatcgctcatgaacgtatgaaaatttttgcttatattggtgtagtagatgcaattttaagattagctattgttttcttgttaactagtggtaacatagataagttgatattatatgcagtattgttgttgttattgcaattatcattattcattttttatgtattatattgtaaactttcgtttaatgagtcgaaagtgaatttcttttttatagataaaaaactctttaaggaaattttctcattctcaggttgggggataattgcaggtagcgctattgcattaaatactcaggggatattgttgttgttaaactatttctttacaccatctgttgtggcagctcgtgcagtttctttacaagtgtatagtgcagccaatctttttgtgtcaaatttccgtacagcagcgaaccctcaaatagtaaagaaacttgcagcgggtgatatagtaggatctcacaatttgttattacaatcaacaaaattttcttattatttaatgttgttgttatgtcttccaatctgtttacttgcttcaccgttgttaaacctttggcttatagaggtacctgattatgctgtgccgtttttgcaattggtgataatccaaagcctatttcaagtgtttgatacttcattttatacagctttatatgccgttggtcgaataaaagaaaatgcattaatctctcctatgatttctttgttaagcttccccattgtttttgttctatttaaaatgggggcatctccacttgctctatcttggataagtataattgtatttgcaatagcaggatttttgctaaaaccaatgctaattgtgaaaatagccgattattcatggtcagaaatattttccatgatgcgcatatgcttgatagtaacattaatggctgtaccaatgccattgataacttttatattgttagatgtagatcataatattgggcactttggcttggtgttagttacaagtgtggtgagcgtttgtttggctgtttggtactttggtatgacagctggtatgaaacagacactattgataatattgaaggcacgatatcaatctatgaaatggaaattatgaatttcacggttcaaattcaatcattttttgtggatgatagtaatctacattttattgtaatattaaacgtgtaacatttgattcattattaggtagtatatgagtaaagaatataaatataattttctatatcctgttatatagatatagagaagtggttttaaggattgtttaaagacttgtttttttatgaaaataggaatattaactctgcctcttcatattaattatggagggtatttacaagcatttgctttaaaaagtattttattagaacatggtaatgaagtatatttgattgagaataaaaatctctatggtaatcttttaaaacgtgggttgagacaaataaaagattctttcagtttattattgttttatttagggaaaaaaaacaaggaagctgagtttattcttaaagagaaaaaaatatctattttcaaagacaattacatgtgtccaatagtagatataagtaattctaaaactcttaatgatttagatattgtcatagttggaagtgatcaggtttggagaccttggaaaggtctatgcagaaattcgctatatttctttctagattttattaaatctacaaaaacaaagaagatatcttatgcagcttcttttggtatagataaatgggaatataatccagttgaaaccattcaaatcaagaagctattacaggatttctcaattatatctgttagggaagatgatggagtctctttattacaagacaatttaggtttaccctcaatacgtatgtgtgatccaactctccttttaacaaaaaatgattatttgtccacgttaaggattcatcatcctgacaacgataggatctcttcttatattttagattctaattcttcaaaagatgatatgctaaaaattgtagccagtttttttaaaaatgatgttttgcccctagggtattctgaagataatggagtatcaagtatcaatgactgggtccgccaccttgtatcatcaaaatttcttattacagattctttccacggaaccctttttgctattaattttaatattccttttgtgactcttttaaataaaaatcgaggtgtgtctaggatcaaatcactattgggtacatattctctttgtgggagaatagcatatagtgaaaatgatgtaattaatatctgtaattctgcaattgattgggataaggtaaatagtattattattactgaacgcaataaaggtattaatcaacttaaaagtattatcgaatgatatcaataataattcctttatacaacaaagagcattatatacttgatactatcaactctgttttctgtcaaacaaataaagattgggagtgcgtaattgttgatgatggatctactgatcgaggccccgaattagttaaaaatattcatgactccagaataaaatacttaaagaaaaaaaatggaggagtttcttctgctagaaattttggagtttcaaaagctatgggtgaatggattttatatttagatgcagatgacacactaaaatccaattgcattaaagatttttatatagcgatagacaactatcctgacagtgatctaatttcggcaaattttactatttctgatggtcaacataatcaaaaagtaggttctcgatgcgaaggatatgttagtaatccttgctctgaattattctttgataggttgtatttaaggcctggagctttcattattaagaaagatcttgctttggaatataaatataatgaaggtttgtctagatatgaagatttggaaattcagttaagatatgtggcacgacttaaaatttgtcacatttcatcttttgtaatgaggtatgtacaagaagcaacagaactaagtcaacattatggtaatcctgaaagagattatttgtgtcatttgaaattagacaagcataaaatttgggacagcttgattaagtttaagtgtatgtatattgccttgcgaaattattcacctattaaaaataaatattcaagaaaatatcttagatggatactatttatcattttaactagaatgttctatgagtgtaagttttgtttttcaaaatgtatttaatcaataattatggagcgtccgttttttctcattttcgttaagtacttttactcactattaacattgcttgcatttttttcgccagtctcgtattcaatatggttgtttttaccagctataattttaatgtggatatcttatgctttttttaaagtaggtgtttacaaaggtttaaaatttaatatgcctattcgtatacaatcaaggagtactagtataaatcatcgcaaaatatttttgcttttcacgattgttatgatagcttttattccactctatattaaatattatacaggggcgaatgctttgactctattactcagttttagatcaatggcaggatctgatagtaattatgcacaatatcagagttactttgccgaaaataatttagctcaatttagcatgtcaaaagcgccatatattttgggatatggtattcttaagtatatatttatattcttctgtatgtattttattgcatatactaaaaaagctaggaagaaagagtattttcttcttttcctgatatttttcttatattttcttcaaggagtatcaagaggtacatcctttgaaaatttcgaacttatcattgtcactttgttctctttgacattaaggtacaagttaatatataacaggagtttctttaataaaagaaatttattatatgttagtgtattaggcgttttaggaattacctatttcgtggtgagcaagtccatgaggtatgcagagggaacagatgcgttaatgttgagggatataacagctactttgaaatttgatagagatcattggatcatgtctattgtaccatatattggaagtgtctgcatgaatcttgcaggatattttacatttggtttatattatacatcagagcttttctggaaagtattaatgtctttagatggttttccaatttcttttttaccatgggcttcatctttaatatatccaaatatgacatgtagtaatgtaatagagtctgttaacgtagatacaggagcttgctggcaacctgatttttctacattaattttttctttaggtataccattgacttattggataatatataaaatgggattttttgctggtagattttataattatattataaatacaagagatttatcctatactataggtttgttctatatttcgtatgaaatgttatctttccctatcggtaattttataacatcgtcctctgcaaatcagataagtatatttattactctttttgtaatttacacaggttggtttaaaaaacttctaataataaaatgaaagtacttgtaattagtcacaactgtttttcccgtatttataacaatggtaaaacgctttcagctatatgttctgcttttgacaagaaagaattatgccagttgtattttacacctcaaggtgagccttattatgacaggtgtgaagattattatttgattactgataaaaatgctttgaagtcaattttctgtaggacgaaatgtggaaaaataattaattctaacaatttactatacaaaaaatcagaaaacataagcagttctcatagtaaacagacatctttaaaattgctattacgttcattaatgtggcaatttagtgcatggtgtacgagagatctaaaagaatggctttttaatcaaaagcctgaaattattttttatgtaggagggaattctgtattttcccacaaggttgctatcgaaatatcgaaaatgttaaatattcctcttactacatactttacagacgattatgtaattaatccatctactactttatatattaagtggctcaagaaacaatatcgcaacacaatcaatcattcgtctttactatttgctataggcgaacaaatggcacatgattattctctatattataataaatattttttaccaattatgaatatcgtagatattgatgatgaaaaaaaaatcacgtcactgtctactgatgtcgtaaatatatgttattttggaggattacacttaggaagagatgttgagctctgccgttttgcaaaatatttgcgtgagaatatatgtccaaatatatccgtttcagtaaagcttaaagtgtataccttttctagattaagtgatgatgtgataaaacaattcaaaaagtatcgtgtggaactatgcgatggtttaactggtgatatattaaaaaagcaaatggaagcatcagatgtctttcttcatgtggaatcgatcgatcctgcttatcataaattgacgatgttatcagtatctacaaaaataccagaatatatgagttatgccaagccaattattgcattcggaccttctgacgtggcatcgttcaaagtaattgcttgcgtatgttctaacttagtaattaatgacaataagagcacttgggataataatagtaatgaagatttaatatccctatttcatgataataatttttataataaaatatgcattgataattatagctatgcaaaaaaacattttaacataaaagatgtatctaaaaacttcaagaataatttatcattattactgaaataaaaatatcaagaatgaatattctattccttacaatgtataaaatggtggatataaatgaaaataatatctacccaaacctgatgaaaaaatttcatcaagaaggccatgaagtatttattgtttctccttgtgagagaagagaaggtaagcccacaacattaagggaaaaaaaaggtgttcattatctgaatattaaaacattaaatgtccagaaaacgaatgtaatagaaaaaggtttaggtcaaatacttcttgaaaaacagtttaaatctgcgattaaatattattttgggaatatacgatttgatgttattctttattctacacctccaattacatttactgaggtgattaaatgggtaaaagataagaacccgcaagcgatgacatatttaatgcttaaggatattttccctcagaatgctgttgatttaggtatgttgtctaaaaatggaataaaaggtttattgtattattattttagacataaggaaaaaaaaatgtatcgtatttctgattggatcggatgtatgagtccagccaatgtaaaatatgtaatggagcataataaggaaataactccttctaaagttgaaatatgtcctaactcttatgaagttccaaaattaaaatccgagctaagtaaggatcaaaaaaatgctattcgttcaaagtatggattaccattggaggtcccaatttttatttatggcggaaatctaggcaaacctcagggaattcttttcttaattgaatgtatgaaagtgaatatgaatcgaacggattgccactttgtaatagttggcaatggagttgattatcctattcttgaatcatggtataacgcaaacagcccaaagtctgtttctgtttttaagagtcttcctaagaatgattacgaccaattagttgatgcttgtgatgtgggtatgatatttcttgattatcgctttacgattcccaattaccctagtagactattaccttatcttttgagtaagatgcccattatagctgttacggataaaaattgcgatacgggtgaaattgcggtaaagaatggttatgggctatattgcgaaagcgatgatgtaaatctgtttatatgtattgttaatgaaatgttaaagcgggatcgtaaaaaaatgggagaaagaggttatcaattctttttggacaattatacagttcaacatacatatgacgctattatgcagcatatgtagaagtttatatataagttttaatttagtaattagataagaatgaatcacaatattattattacctcagcaggtcagcgggttgcattagttagagattttaaagaaacacttgttcgcttttatgcagaagctaaagtgtttactacagatatgaatccggaattggcaccagctgcttacgtaagcgatggttgttttgaagttcttcgtgtaactgatgagaattatatttcacagttacttgatatttgcaagaagaatgaaattggtatgattgtgccaactattgatacagagctgttggtgttggctgaaaacaagaaattgtttaatgacaatgatattatagtttgtgtttctgatttggatttcattaaagtctgtcgtgacaaacgcaacactggtgatttcttggagaagcacaatatccgtgtaccaaaggcggtggataagtataatcctacatttccattgttcgctaagccttacgatggttctttgagtactaatcttcactatataaaaaacgcagaggagttaactcaggacatacttgatgatccaaagctgctctttatggagtacattgataaggaaacttataaagaatatacgattgatatgtactatggtacggacaattgcgtgaagtgtattgtcccacgtgagcgcatcaagatacgtgctggtgaaattaataagggtcgtacagtgaaatgccctttgatggattatattaaggaacgtttggataagatagaaggatgcattggatgtatttgtatccaggtattctttaatccattaactgaagatgttgttggtattgagattaatcctcgttttggaggaggctatcctcagagctatgctgctggtggtaattatcctgagatgttaatcaaggagtatttccttggtgaaaaaattgcctacattgatgattggaaagataatatgttgatgttgcgcttcgatgatgctgtttacgcgtaggtagaggtttaatgtttttatagttaaatgtataaagttgtttgcttcgatcttgatgatacgctaagcaaggagataaaatatctagaatcagcttacaaggagattgccagatatgctgcacgccattgtgaaggttgtagtgattcggtgaatatacttgaggcgaaatcttttaaggaaatgcttagggcttaccatgaaggtaaaaatacttttgacgagttgaattcctttcttggtttgtctatccatgtgaaagattatcttgatatatatcgaaattttaagcctacttggcagttgcttcctgaagtttcagatttactgaatcgtttgaaagaagatggctgcattttggggctgatttctgatggacgatcagttcaacaaagaaataaattcaatgcattgggcttgaatcgatggataaataataatgatgttgttatatcagaagaattcggaagtgagaaaccatcgctagcaaactatgagtatttcatgaagcgataccctaatgctgagtttacttatgttggagataatccaaagaaggatttctttgcaccaaatcagttagggtggaatacggtttgcttgctcgataatggtgagaatattcacaaacagacatttgaatctgtaggtgtggagtatttgccaaaaatgaaagttaaggcattaaatgaattaatagaattgatataatggaaataaattttactgctagtcagaaattctatatgacatgcgtgaagagaccaattagtttcttcggtgctttgattggactaatcttgttgtcaccaatatttattactactgttatcttattgcattttgcgaataagggcgcaggagttttttttacccaaaatcgtccaggaaaaaatgagaaaattttcaaggctctgaaatttaagactatgactgacgagcgtgatgcagatggtaacttgttgcctgatgcagatcgcatcacacctattggtgctttcgttcgatcaacttcaattgacgagttaccgcagttgattaatattttgaagggcgatatggcattcattggcccacgaccattgttggtacaatatctaccgctttataatgaggaacagcaccatcgtcatgatgtgacacctggtatgagcggttgggcacaggtgaatggccgtaataatatatcttggtcaaagaagtttgaactggatgtatattacgttcgccacatcagcttgtggatggatattcgtgtgttctttacaaccataaagaaagtcctatttcgtgatgatataaatcaggaaggtggtgaatgggtaactatggatccatttaatggtaataactaattgatttttaaaatattatacaataatatgtcagaaagaaaaactatttatctctgtcttgctcatatgagtgaggagggatgggagcaaaagtatgtaaaggaagcttttgatactaattgggttgttccaatgggaccgaacgtaaatgctttcgaagataaactccgaaagttcgtgacaggtaataatgagagtgctgtatatggtgattctcgttggccagaagctactcaggcttcttggcatttgaatcctgagttgaaagattctaaggttgtttgtctctcagcaggaacaggtgccgttcacttggcattgattgctgctggtgttaaagctggcgatgaggtatgtgtacaaagcttcaccttctgtgcttcatctcaccctattacatatcttggtgctaaaccagtattcattggatctgagaaggatacatggaatatggatcctgaattacttgagaaggctattctcgatcgaaaggagaagacgggtaaatatccaaaggcaatcatcccagtagcgctctatggtatgccatatcagattgatcgcattatggagattgcaaataagtatgatattcctattatcgaagatgctgctgagggtatgggatctcgtttcaacggtcagatccttggtactttcggtaagtttggtgtactctcattcaatggtaacaaaatgattactacttcaggtggtggtgctttgatttgtcgtaatgctgaggatgcaaacacaatcatgtggtacgctactcaggctcgtgatgcatatccttactatcagcatacagctatcggtttcaactatcgtatgtcaaatgtatgcgcgggtattggtcgtggtcaaatgacggtactcgatcagcacattgctcaccataagcacgttcaggctctgtatgaggatttgatgaaggacattcctggtattcgcatcaataagcaaccaaatgatccaaagtatgattctaactactggctttgtaccatggtgcttgatccggaggtgaaggtcgtaggccaggagaatgcttacaaggaggtcatcaagactgctgttggtggtgctgcaggtgttattcatgctgttgagtctcctactaccgattgtcagccaaatgataatgtggaggctatgcgtgtgttcatgctcagcaagaaggttgagtgtcgtccagtttggaagccaatgcataaacagcctgcatatgctgatgcacctgtctacacaaatggagtcgaggaagatctcttcaaggtaggtatgtgtctccctgccggtccttatgtatcagatgatgatgttcgctatatcgttgactgtattaaagaggcaatcgtgaatatatcctattagatttatgaaatatgtaggcccctaattcatgctatatacatgaatccctacatcttatcggttggggaaagtacagcggtacatacttgaccaatgccctcatgttggcgtaaatgccagtatgaatttcctttgtatatcaactgtctgggaagatcgttgatatattttattgattaatagcggtttataatctatcctaaataaaaagagctccgacaggggctttttccttttctatacgaaataaaaactgcacctttgcatcgttgatcaacgaaatgtgaataaaataacttgaatttgaatcttaaaaaaacgtagtatgagtgtaatttacaaagtcattacgcggccaacggatccgcgtgttcccaattctcctaagagattttatccgcatctgattaccttgggacagtctgtcagtttgaaatatcttgcagagaaaatgagggatcgttcttcgctttctgtcggtgatatcaagagtgtgattcagaacttcgtggataagatgaaggaacagttgctggaaggtaagtcggtgaatatcgaaggcctgggtgtatttatgttggctgcccgttcgaaaggtgcagatctggcaaaggatattacagccaagagtgtggagagtgtccgtattttctttcaggcaaataaagagttgcgcatcacaaaatctgcgacccgtgaagatgaaaagctggacctgatcagtctggatgaatatctgaagaagaacagcgtggtcgtatctcccgaagacccggaaaatccgggtgaaggtggtggagaaggaggaggtggagtaacacctgatccgtctgtttaattgatgtctgctaattgacagttgatagtattttataaatgtttaatttggaaagtagaaaatctatgaaaaaaacttggagcatgattttgaaagtgattattgctgttgccggtgcaattgccggagtgatcggtgtacaggcggcaacaatgtaattggtatcttagaagatataattaggtatgaatgacaggcgggaaaaatcccgcctgttttgcgttttagatatgtacgattacacttcttcgcatacc

SEQ ID NO: 3117 - DNA, 491 bp, Unknown
  gut microbiota DNA sequence
aacatattgtggtgcctaaactaggacgtttgcggatcaaaggtgctcagcagcgactattggatcgtcaagacgaaacacgcattggtacggtaaccatttccaaagatgctgccgatcgattctttttgtcgctgcaattaggttccgatacaccgtttgtttctaagcttagccgcactaatcggcaaattggcattgatctaaatacagaaaattttctgactgccagtgatggtcgaaccatcgctaacccgcgctactatcgaacaatcaagggaaaattagctaaagcacagcgcactctttcacgccgccagcgccgggctaaaaaagagcagcgttctttgcaggaaagcaaaaactaccagaagcagcgtttgttagtcgctaagatccatgcacgggtatttgaccgacgccatgattttctccaacgcacgtctacagcactgatcaagaaccaagatctcgttgtagccgaagaattg

SEQ ID NO: 3118 - DNA, 836 bp, Unknown
  gut microbiota DNA sequence
gtaagtttgcgcccgaaatattgaacagtaagtatttacctaaaaacataaaaactaattatcatggcattaaaattcattacagctgaagaagccgcatcttatgtgcatcataatgacaatgttggtttcagtggttttacacccgcaggatgcccgaaagtcgttcccggagctatcgcccggaaggcagcggaagaacacgctaaaggtaaccctttccaaatcggtatgtttaccggtgcttctaccggtgataagctagacggagaattggctcgcgctaacgccatcaaattccgtacaccgtaccaatcgaacaaagacttacgtgccgcattaaacgctcatcaggcacaatatttcgatttgcacttgtctgaattggcacaaagcttgcgttacggattcttgggtaagatcgatgtagcgatcgtagaggctgccgatgttactgaggatggtgagatcgttccgacttcaggtgttggtatcttacctactatctgtcgtatggcagaccgtatcatcgttgagttgaactgccgtcacccgaaagaaatccgcggtatgcatgatatttacgagccggctgatcctcctttacgccgtgagatccctatctacactccttctgacaggatcggtaacgattgtgtaaaagtagacccggctaagatcgttggtgtggtaaggaccgatgagccgaatgaaggtggaaaattctctccgctggatgatgttacgatggcgatcggtaaaaacgttgcggacttcttggttagcgagatcaaggccggccgtcttccgaaagaattcgttccattgcagagtgg

SEQ ID NO: 3119 - DNA, 36207 bp, Unknown
  gut microbiota DNA sequence
agagaaccccggagttgattacgttcttctgtcagtttgtcggctttttcctgatgcacgctgttaagtttgccggtacttttttctgattttccctgcaatgcatttagtacaatgcgtggaacacctcttttaatattagctttctcaccgcgtacattctgtttgtctcttcgttcggctgtttcacgggctaccttgcgtgctatccgcagtgctttttctttttcttcgatacgctgttgtaaggcttcctgcatcagagttttctgttctttgtagaattcgtagtttccgccataataagtgagttgatgtttctccaattcacatatttcgggaagaagattgagcagggtacggtcatggctcacgaccaacaacgtagagtgacatttctctacccagtcatacaaacgttgtcggcccgacgaatcaagatgattggtcggttcgtccatgagtatgacagagggattatgaatatccatacctgccagaaaaacacgggtcttttctccgccgctaagcaaatgcattgggtaggacaggggaaactgccctaatccccatgagtcaagagcggcaatggaacgttcttcgatattccaatcatcgtccaactggttaaaattctccgttgaggcatctcctgccaggatagcttgcagggcttgttgcttgcggtctatccgcaaggcttgggcaatggtcagcgaatcatattgtccgaaatgttgggggatgtaataaatgtcgtccgggcggacaataacgccggaagacggctgaagttgtccggtaataatttgcagcagggtagatttcccgcagccgttattaccgactaatcccagtttctgccctttactaatggcaaagttgaggtcactgaataatacttctttatccgggtggatatagctgatttgttgaatacttataggcatggttgtctattgggtttgaagtgaaagaaatagtgaaagataatcacggggcagggggcgacaaacacaataccggctaaacaacacggattccgtgatgcttaacaacgaggaaaaagcatataagaaaagtgatgtttacttagaagtgttgtcttacttggaaattctcattgcggtaagtatatagtttaacttgggcgcaaagatagcacttttggggaagaatcctattctatttcagtagaaaagttatttcagaggctccatttactcaattcagaccttctgttctgctgaatcagaacctttgtctgccctgtttagaggctctgtttcggtagtccggaacgtgaatggagaagtttttttgagttaacgacaaagttctgagcattagggactaaagtttctttctattggtggtaatctataaacgcaacttgtatttataaaaatgaagctttcatttataaaaacgcaggttgcatttataaaaacaaaagcttcgtttatagtttattgttagggtctgacaagtttagtattcgtccgggataagtttatgagtaggcaagaggaagtttattgctaatcaactggtttatagtctatatcttcctttatttctttaccattctatttcttatatatcgaacaattcattcaagccttcactcatactaggatgcgtaaagatgaaatcccgcaggaatgtataatgttgtcctgttttcatcgccatggcaacgatattgattatttccggggcttcggcgcaaaacagtgtacaccccatgatctttccgctatggtcgtttacaattgctttcagcatgccgtctgtctgtttcaacgtgcgcgaacgtaccacagaagtagccggcaaacgggaaaccttaaaagaatatcctcttttcagtgcttcttcttcggtaagtccgatatgagccaacggcgggtcgataaatacggcataaggaacagggtcacgatctccgatgtcccgtttcttgtctccgaaaagctggtcgcggatgatccggaaatcatctaatgagagataggtaaactgcggtccgcctttcacatcacccattgcccaaacgtgagggacggttgtgcgtaactggtcattcaccacgatagccccgtgagcatccacccctatacctgttgcttgcaggttcaacccttcaatcataggctttcgcccggttgcgataaggatagcgtcaccgtctacaaaataaggagtgccgtcggatacgtccgaataagtcagcgtcacaccgtcattcgtatcatggatagactgtgcacgggcattcagatgaatctctatccctttcttttccaacacctctttcacgctgttcgctatatcctggtcgttgcggggcatgaaccggttgcctccttcgagaagggtaactttgctcccgaactcggcatacatcgaagcaaattccagtccgatatatcctccgcccacgataatcaggtgttgaggcagcacgttcaagtccaaaagagtagtgctggtatatactttctgactctccttaatcccgtctattgccggaataatcggtgtggaacccgtattgatgaagatttctttcccttgcagttcgatatccccttccggcagcgccaccttgatgatattagccgaaacgaaagaaccttctcccgtgtagaccattacattgggacgtttgctcaacctttcataattattgtttcttaagaaagacgtcagtctgtttttccggccgatagcctgtttgtataagttcgcctgtttcggataatcatcgtgatagagcaaggcggcaatgccggcttcgtgcacgagcgttttcgtcgggatacaggcgatgttgggacacgttcctccatacatcatgcttgaacgttccacgacggcaacttgccagccgcggtttgaaagttcggcagcaagagtctttcctgctttgccgaaccctataatgattgcatcatattgtttcataacttctttcattaacgattaatattcaactatataacagtgagatgaattatttgttttcgtcgtttcgagaagttaaggaattcaaaagtagtgaggttagtcttttttcaatgttttgagtacacgttgtgacgagtcggatagaagcactactgcacctgccagtatgacgatatctttaatcaccagccgtcctgcaccggacagtaacgggaaaccgaattctccgctccccaggttgggtacccagacctccggcgtggtgacgaggaacgaaagtgtaccgagcgtcatgatgatagcgagcgaatcgcccaccagtcccactttggggaagaagatgcccaagaacaccagaataccgatactcatgataagcgctcccagtccgtaggagaaagtatatgtgttgttcgcttcgtgccatgcacggttttcgggtaccagagcaccttccggattcttgaagtttttgtactccggcgcttcctttgcataaaagaagctcatgaacgggctgttggctacaaacggaacaatcccgtcggcttcgtagtggaaatacttcagcccgcctatccatacgaatacgactagaatggctacacggataaacttggtaccaaaatttctcagacttgatgtgaaggtcagtaatgcgataaatttttctttcatattgttgtcgtttatgagtttaacttacaccgcaaaggtcgcgctttcctcataacctccaaatggcaatactgccgcattacttatcaattcttcccaatctgctcatttctgaactgcacggcactctgtcccgtcatgtttttgaagaaacggctgaaagaagcctgatcttcaaaccccagaatatcggctatctctttggcacttttactgctgtacagcagcaggcgtttcgcttccgcttccacccgttcatgaatcacacggagtggggaaggcagtttgcacgtagaaaagatattcgacagggttttgggtgatttgtgcaacatatcggcatagtcctgcacctgtttcttagtcttgtaatactcgtccaccagattgtagtattggcggacaatctcgaagccggattccttttcccgtgtaatgtccaaccggtgacgggctatccgggtacattggatgataaaccttttaagaaggatgcgcagcatttcttcctgaaggctgtccgaaacggtgaattcgttttccatggctacggtgatatcgttcagttgccggcgttcctgctcgttgagggtgaagcggacaaggtgggacgaaccgttgaagaggaaaccgctgcacgacacctcatggtcattgccgtagatgcaatagaaattactgttgaacagtaaagttgtatattccccgtcgattgatttgaactcaagatgttgcaggtgtgtcagtgaaatcacatcatcctgcgacatcagcatttcctggtggtcgatttccaccgtgatacttcccttgcgcacccatataaacttgtagagtcctttttctttttgcagtgtcttctctgtctgataagaatccgtaagcgcgagtgttcctttaagttttgtgtgatattgttgcagcataattaatcctccatagctgatgcgtcaaatgataacggcagtaagtcgcctatacttttaatttcgtagatgcattctttgccgtaaagcagaatgcggatcggttgcccgtagcgtttctccgtttcgagaatcacctggcggcaggcaccgcagggaggaatcggattatcaataaagtctttctccgttctggcggcgatagcaagtgtgatgacgggctggtcggggtatcgggagttggcatagaacagtgtggtacgttccgcgcagagtcccgacggatatgcggcattttcctgattcgtgccggacaccacagttccatcgcccagcagtgcggctgcacccaccgagaaatgcgaataagggacatagctgcgtgcggttgcttccttggcagtggtcacaagagcccggtcggcctcattcaactcatcatattgatatactttaataattgcggtaattgtgaggtctctcatatacgttaggggattggtttctacaattaatgttacaaagttaggaaagagattgataatcccaattatttttcagatttttgtgccttataatccacatctgaaataaaatggagaacaaactgtatagactggtcttttttactatggttttcttctttgcagtaggagcgcaggcgcaacgaagaaattcccgttacgtagaatatataaataagtatagtgatctggctgtggagcagatgaagcttcataagattccggctagtataacgctggcgcagggattgttggaaagcggagccggatatagccagttggcacgcaagagcaacaaccattttggtatcaagtgcggcggcagttggcgggggcgtagtgtccgccatgatgacgatgcgcgtaatgagtgtttccgtgcgtacagtaatccgcgtgattcgtacgaagaccactctgagtttctgagacgcggagcccgctatgcctttcttttcaaactggatattacagactataaaggttgggcacggggattgaagaaagccggatatgccaccgacccttcttatgccaaccgtctgattactatcatcgaagattatgacctgtataagtacgaccgtaagggtgtctactccgaacgtaagctaaggaaaaacccctggttgatgaatccgcatcagatttacatagccaatgatatcgcctatgttgtcgcccgccacggagatactttccaggatttgggcaaggaattaggcatcagttggaagaaacttgtgaagtataacgacttgcatcgtgaatataccttaatggaaggagacatcatctatctgaaatccaaaaagaagaaagcctccaaacctcatactgtatatgtggtgagggacggtgattccatgcatggcatttcccagaaatacggtatccggctcaaaaacctgtataagatgaatcgtaaggacggtgattatgtccccgaagtgggcgaccgcctgcgtcttcgttaggcagctttgaacacgcttcttttcctttttgtaaaagttggacaaaaggaaaactaaatgactcatccggatgttattattaggataaaacatgattggagtatgagtctaaatattgcaaaagttgacaagaagcgtgtcgtcatagtaggcggtggtttcggtggcctgaagttagctaataagctgaagaaatcaggctttcaggtggtattgattgataagaataattatcatcagtttcccccgttgatttatcaggtggcttcggcgggtatggaacctacttccatttcgttccctttccgtaaaattttccagcaccggaaagacttttatttccgaatggcggaagtacgcgccattttcccggaaaagaacatgatacagacttccattgggaaagccgaatacgattacctcgtcttggcggcaggcactaccaccaactttttcggtaataagcatatcgaagaagaggccatgccgatgaagaacgtctccgaagccatgggactgcggaatgctcttttggctaatctcgaacgggcgctgacctgctcaaccaaacaggaacaacaggaactgctgaatatcgtcattgtaggcggaggagccacaggcgtagaagtggccggtgtactttcggaaatgaagaagtttgtactgccgaacgattatcccgatatgccggctagcctgatgcatgtctatctggtggaagccggaccacgactgcttgccggaatgtcggaggattcatccgctcatgcggaaaaattccttcgtgaaatgggagtgaacatattgctgaacaagcgtgtggtcgactatcgcgatcataaggtaatgctagaagacggtagcgagattgccacccgtacctttatttgggtgagtggtgtgactggtgttactttcggaaacatggatgcttcgttgatagggcgtggcggacgtattaaagtcgatgaatttaaccgggtggagggaatgaagaacgtctttgccattggtgaccaatgtgtgcagttttctgataaagactaccccaacggacatcctcaactggcacaagtcgctatccagcagggtgaactcctggcaaagaatctgatgcgccttgaaaaaggagaggagatgaaacctttccattaccggaatctcggctcaatggcaactgtcggtcgtaaccgtgccgtggcggaatttagtaagataaagacgcaaggttggtttgcctgggtgttgtggctggtagttcatttgcgttctattcttggcgtgcgcaacaaggtggtggtactacttaactggatatggaactatttcacttacgaccagtccatgcgtatgattgtctatgcccggaaagcaaaggagattcgtgacagggaggtcgttgaagcgactacccacttaggaaaagacctgctgcacgaaccgcaacaaagcggacaggaaaaagcataatgtcgtcttatgcggcacaccgttctgtttctgaacggtaaattcgtacagggtgttcgatttcggacaccctttcttttgggctacattctctatttcagtagtttatgattctggcacggatttggtatatataagttccgaatgaatataatacatgataaaatcataaacaatcagatatggacagagaaattcctaaggaagttcgtcagaaagaacgtaataagaaaatcattcgttattcggccataggggtggcaggagttattgttgtcagtgtactcatctctttgatgagagtgggagtagaagaaaaagatcttgtgttctctacagtcgacaaaggagtgatcgaagtcagtgtcagcgcgtcgggaaaggtggttcctgcttttgaagagataatcaattcgcctattaactcccgtatccttgaaatctataaaaaaggaggcgatagcgtggagataggcactccgattttgaaactcgatcttcaaagtacggaaacacaataccagaaactgttggatgaagaacaaatgcgtcgttataaacttgaccagcttcgtgtcaacagccagaccaaactttccgatatggcgatgcagatcaaggtttcagccatgaaacttagccggatgaaggtggaactgcggaacgaacattatttggacagtctcggggcaggaacaacggataaagtccgtcaggcggaactaagctataatgttgcccagctcgaatacgaacaacttcaacagcagtttaaaaatgaacaggaagtggccgccgcagagttgaaggtgcaggaacttgatttcaatatcttccgtaagagtctggcggagatgaagcgtacgtttgaggatgcgcaaatacgttctccccgaaaagctatccttacctttattaataatcagattggtgcacagatttcgcagggcgaacaagtggcagtcatctccgatttgagtcatttcaaagtggaaggcgagattgccgatacgtacggtgaccgtgtgtcggcagggggaaaagcgattgtgaaaatcggcagtgataaattggaaggaactgtcagcagtgtgacaccgctttccaagaatggggtgatctctttcagcgtacagttgaaggaggataaccaccgccgtctgcgttccggattgaagacggatgtctatgtgatgaatgccgtgaaagaagatgtgatgcgtattgccaatggctctttctatgtgggacgcggtgaatatgaactgtttgtctgcgattcggatagcgaactggtcaaacgtaaagtacagttgggcgattccaactttgaatatgtagaagtgctgagcgggttgaaactgggcgacagggtagtggtgagcgatatgaactcctataaaaacaagaataaactgaaactaaaataaggtagaagatatggttgtcagggtatatttgaaacaagcgtggaacttaatgaagcagaatccgcttttcagcacgctctatattgtaggaacagggatttctatcgttatgacaatggtaatagctattgtgtattatgtgcggttggctcctgtttatccggagacgaacaggatgcgtacattggtggtgaaatccgctaaaatgacaaacgatgagagtactcattcttccaatatcagttatgcaatgttgaaagactggttctactcgttggaaagtgcggaagtaagtaccggagtgtctggtacaagttatgcccgggtgacaaacgacaaagaagaaattccgacttatgcaaggtatacggacgagaactttttccgtgtctttcctttggtctttctggaggggaagccatttactgaggccgatcgccgtagcggtattcataatgtagtactgacagatagttatgcacagcagcttttcggaacaactaagggagtggtcggtaaaaacttcttaatggattataccaatgtaaaagtggtgggtgttgtgaaaagtggcagttttcttacaccggactcgtatgcccaagtttatcttccttatagttgtcgcgatggctatgatgatgaaggaagccattgggcgttgggaggttatcgtgtctacattttgatgaaggaatcgaaaagtgtcacagatgtacaagatgaagtactggaacttgtccgtaaatttaatgtatcggatatgggtgacgggtggaagctggatttagtgggacaacccgaactttattggcatagcactttccgcctctggagtaatgtcgctgtcgactggggcagggtgatatggatgtttgtaggtatctttatggtattactttttgttcccgctttcaatttgagcggcatgatttctgcccgtatggaacgccagttaccggatttgggtatacgtaaggcgtttggtgcttcccgcaggcggttattggtacagattatctgggaaaatctactccttacaggcttgggaactcttctcggattggtaatagcttggattgtacttgctttgtcgggatatgagatattcagtttattcgaagtctttcctaagtttcctcctaaaggagtgaatttgggaatgggaattgatatgttttttgctccgttaatctttgtggcagcggctctgttctgtttattactgaatctgatatcagcgttaatacccgcatggaatgcattacgtcatccgatagttgaatctttgaatgagcagaaatagggttatcaccttatatataatagaattagatcattatgttgaaactgatactgaaaaatctttgggcacggcgagtccggaatgcgtggttgcttgccgaactgatacaggtcactgttctgacctggtatatcactgatcctctctttgtgttaagttataatcagacgttgcctttaggatacgaaccggacgggttgctgattgctcctatccgcagtttgccttccattgctcctgattataataaggaagaagcggattctcttcatacaatggaaaatatgcatcgtatgttacgtaagttgcgtgattatcccggtgtacagaatgctgctcctttggtgacttttgcttttccgggttcgggagggagttcgtataatacttatgcatacgatacattggcaataccggcgtccatatcctactttataccccataccggattctttgagacttttggtttcaaaacctttgaaggaaagacattgggagaattggacaatatggattatcagagaaatgatcttgttgtatctgctgatttgttgcagatccttccgaaggtcggccgattgaccggaaaacgactgttttataatagcgatgacgatgagaaggatacaacttttttctcaataaaaggagtcgtggagaaagtgcgttcccgtaattatgaacaaggtatgtattctttctttgaaccgcaattgaatgttcgttcgaaagacgtatggaacgggggatcttttttgattcgtctgcaaccggatgtgtccgagcaacgttttctgcatgacttccgtacttgggcatacagtaatctgaaagccggtaatctttatatacgggaggtctctacttacaaggaacaattggattacttggaatatggctccggtgttaccaataaataccggatgaatataatattagcggttttctttcttattaatctggcgttaggagtcaccggtgctttctggctccaaactcgtagccgccgtgaagaagtgggaattatgttgagctatggggcagcacccggtaatatatgcaggctattaatgggagaagctgctatattggcttcgtttgcctggttggtggggtgtctgatttatttgcagtatggactggcagaaggcaactggtatgaacagggctatgtcgtgccttcactttggattaacaatttctggctgcattatatagtagtgtcacttatagtttatatcattattatcgttgtggtgttgctcggagtctttattccggcttacaagataagtaggattcctcccaccgaagccttgcgtgatgaataaatgatgaaagatacgaccggaaaaagagaaagacagattataataataacgatttaaatacttacgactgtgattaaattagttggcattaataagatttatcgcaccaatgagattgagacggtagcgttggaggatgtaaaccttacagtgaataaaggagagttcctgagcattatggggccgtcaggttgtggtaaatccactttattgaacattatggggctattggatacaccaaccggtggaagtatagaagtagccggaacaagaattgaaagcatgaaagataaggaacttgccgctttccgtaataagaaactgggatttgtgtttcagtccttccacctgataaattcgctcaatgtgctggataatgttgagttgcctttactttatcgtcgtatgagtagcagtgaacgcaagcggttggcacaggacgttttggcaaaggtggggttaagtcaccggatgcgtcatttcccgtctcagctctccggtggtcagtgccagcgtgttgctgttgcccgtgcgattatcggcaatccggagattatccttgctgacgagccgaccggtaacctggactccagaatgggagcggaagttatggaactgcttcaccggttgaataaggaagacggacggacgattgttatggtgacgcataatgaagaacaggcaaaacagacttcgcggacagttcgtttctttgacgggcatcaagtgcagtaaaaagttaaggctatttgcattgttttcaatataataacttatctttgtgcgaataatattgaaagaggtgcagatcttttgcttatgaaacaacgatatttctgtgtgtttgtagttctgtttattgccgttctttgtcaagcggcagcatcggagcgtacatacaatgtgctttttatccaatcgtatacttcgcagactccttggcatcgcgatttgaaccaaggtttggtgaaaggctttaaagataatggattgaaagtgaatataacgactgaatatctggatgcggatttttgggcattcagatctgagaaagtcattatgcgtcgtttctgtgagcgtgcccgtgacagggaaaccgatttgattgtgacatccagtgatgaggctttctatacgctctttgcgtgtggagactcgttgcccttgcaaataccggttgtattttttggtattaagtatccggatgagaagctgtttgccgctcatcccaatgtctgcggatatacggtcaatcctgattttgatattattttgcgggaggcacagcgactgtttcccaaacgcaaagaggttatttgtgtgattgataatagttttctgagtaacaagggactggaggattttcaggaggaatgggaagtctttcagaaagataatcccgattatgacatgaagatatataacacacaaaatcagacaaccagccatattatttctgctatttgctatccgcgtaatagttacggacgtgtggtaattgctcccaaatggtctccttttctttcttttgtaggcaagaactcgaaagcccctgtttttgctacacagaatgttggtttgaccaacggagtgttcggtgcttatgattgcgatgcctatacttcggcaatgcaggccgcacagagagcttcttccgtgttaaaaggaacatctcccaaagacgtcggggttactgagattccgcaagggtttatatatgactacaagcaactggaattttttcatgtcaatcctgacaagataggctcgaaaggaactgttgtcaatgaaccctattgggagaaatataaactcttgtttattcttctttatccgtctattttggcattattgattgcgtctatcgtatggttgatacgtgttaatcgtcgtgaggccaaacggagggtacaggcgcagacccgtttgttggtacagaataaaatggtggaacaacgcaatgagtttgacaatgtcttccattccattcgcgacggtgtcattacatatgataccgatttacatatccattttaccaaccgttccctgttgcaaatgctacatttgccgttcgatataggtggacgtgtgtatgaaggaatgatggcgggaagcattttcaaggtttatcataatggtcaggatatcctccataaaatgttgaaggaagtagcaaagaccggaaagagtgttatgataccgcaaggtgcctttatgaaagaagtacatagtgacaaatatttccccgtatcgggagaaatcgtgcctatcttttcaagggaagaaattaccggtatggctctttctgcacgtaatatatcggatgaagagatgcagaagcgtttcttcgacatggcagtggacgagagcgctatttatccgtggcagtttgatatggaaacaaattgctttatttttccgcaaggctttctggtgaggttcggttatgatgaagctgttactaccatttctcgcgaagaaatggatcgtacgattcatccggatgatataaaagaaatacgtgttctttttgacaaggccttgtcgggtgaagaagaaagcacacgtttgaacttccgccagcgtaatgtgaaaggcgaatatgagtggtgggaataccgttcttctattgttaccggcttgacgcaggattctctctataatatattaggtgtatgtcagagtatccagcggtataagactgctgagcaagagatgcgggaggcacgtgataaggcgcttcaggcggataaattgaagtcggcctttcttgccaatatgagccacgaaatccgcactccgctgaatgctatcgtcggtttctccgatttgttgagtgatacgagtaactttaccgaagaagaggtgacgcagtttattgccacaatcaacaagaactgcggattgttactggctttgattaacgatattctcgatttgtcgcgcatcgaatcgggaacaatggaatttatgtttgcggaacataacctgcctttattgctcaaaactgtccatgattcgcagcgcctgaatatgcctgcgggcgtagaactggtactgcgtatgcctgcgggcgacaagaaatatcttacgacagataatgtccgcctgcaacaggtagtcaataaccttattaataatgctgccaagttcaccggtagcggctttatcactttcggttatgaagaagatgaagaaccgggttatacccggattttcgtagaagatacgggagtcggcatttcggaagaaggtatccgccatatcttcgagcggttctataaggtcgataactttacgcagggggcaggtttgggattgagtatttgccagactattgtcgaacgtctgaaaggaactatcagtgtcacttccgaagtaggcaaaggcacccgctttacggtacgtcttcctaactactgcgaatagacacccgtacctgctacaaacaatactaaaacggctgcatacataatcgaacgttcatttttgagcatagtgtccgaaaatgaacactgttcttattctttaattgattgaaaataaataccttattcttttggcacatcgtttgaacctccttaggtgaaaaatatagtgcgtaatgaaaaagaaaagtatattgtttgctcttgctgctgtttgcctgcctgtggtattatcggcacagcaggaaaggaagataaccttgaatgaagctattgctatggcacgcgtgcaatccgtagatgccgccgttgccctgaatgaattgaaaactgcctattgggaatatcgtaccttccgtgccgatcttttgccggaagtcaacctgaccggtacattgcctaattacaacaagtcttatggctcctatcagaatgcagacggttcatacagctttgtccgtaacagtgctttgggactttccggcgacctttccattgaccagaacatttggcttaccggcggtaaactttcattggtgtcttcgctcgactatatgaagcagttgggctccggaggcgaccgtcacttcatgtctgttcccattacgctgaaactcacgcaaccgattcttggcgtaaacaacgtgaaatggaacaggcgcattgaaccggtacgttatgcggaagcaaaagctgcttttatcaccgctaccgaagaagtaaccatgcgggcaatcacctattattttaatctcctgctggccgaagaaaacttggggacagccaggcaaaacctctccaatgccgaccacctctacaaagtagcacttgctaaacgtgaaatggggcagatctccgaaaacgaactcttgcaactgaaactttccgccttgaatgcaaaagcttctttgacggaggccgaaagtgacctcaatgccaagatgttccagcttcgcgcctttttgggagtgggagaggatgaaaatctgcgtcccgtcattcccgaaactgtggacggaacgaaaatggaatacaatcaagtgttgagcaaagctttggaacgtaactcatttgctcagaacattcgtcgccgacagttggaagctgattatgaagtggccacggcacgcggtaacctgcgtagcatcgatctgtttgcaagtgtggggtataccggagagaatcgtgatttccctgctgtttacaagaatttgcaggataaccaaattgtgcaggtcggcgttaagattcctattctggactggggaaaacgccggggtaaagttcgggttgccaagagcaaccgtgaagtggtgctttccagaatccgtcaggaacagataaacttcaatcagaacattttcctgttagtggagaatttcaataatcaggcgcagcagttagctattgcaaaggaagctgatctcatagcgcagcaacgttacaagaccagtattgaaacctttctgattggcaagattaatacgctggacctgaacgacgctcaaagttccaaagatgcggcgcgtcagaagcacatttccgagctctattattattggtattatttttatcagattcgtagcctgacgctttgggatttccgtaccaataccgaactggaagccgattttgatgaaatagtgcgacaataaaaaaggaaaggtccataaagacagtatttttttgtagatttgcatcatcacagtaatagaaaaggaagctctgatagaatatagaataaggaatacgaactatgattctgataattgacgatgatagcgcggtacgttcttcgcttagttttatgttgaagcgtgcgggatacgaagcacaggtagttcccggtccccgggaagctatcgaggtagtgcgtacggtagctccggatttgatacttatggatatgaacttcactctctcaacgacaggtgaagaaggtttgactctactcaaacaagtgaaagtgttccgtcccgacactccggtgatactgatgacagcttgggggagtatccaacttgccgtgcagggaatgcaggcaggagcttttgactttattcccaaaccgtggaacaacgctgccctgctgcaacgtatcgagacggccttggaactttccactgctcctaaagaaacaacgcaggaacagaacgacgcattcaatcgtaatcatatcatcggtcgtagccaaggcttgacggacgtattgaataccattgcccgcattgcaaagaccaacgcctccgtattaataacaggcgaaagcggtacaggtaaggaactgatagccgaagcgatccatattaacagccagcgtgctaagcatccttttgtaaaagtaaacctcggaggaatttcccaaagcctgtttgaaagtgaaatgttcgggcacaagaaaggagcttttaccgacgcttccgccgaccgtaccggacgtttcgaaatggcagacaagggaacgatcttccttgatgaaataggcgacctcgacctttcctgtcaggtgaagcttctgcgtgtattgcaggatcagaccttcgaagtgctcggcgacagtcgtccccgcaaaacggacatccgtgtagtttccgccaccaatgccgatttgcgcaaaatggtgaatgaacgtactttccgtgaagacttgttctatcgtatcaatctgataaccgttaaactacccgctttgcgcgaacgccgtgaggacatccctttgctggtgcgtcacttcgctgaccgtcaggcagagacgaacggattgcctcgcacggaattttccgctgatgccatgcaattcttgagtcgcctgccttatccgggaaatatccgcgaattgaagaacttggtggaacgtacgatacttgtcagtggcaagcctactctcgacgcatccgatttcgacgcccagtatatccgccataacgatcagaaagcagccgaaagtacttcttttatcggcatgactttggacgaaatagagcgtcagaccatacttcaggctttagaacggcataaaggtaacctgagtcaggtagctatggcattaggtatcagtcgtgccgccctttaccggaggcttgaaaagcataatataaattatacgttataatagcttgtatattgtggctctgtctgatgatgcagacagataattaccagtgaatcatataacttaaaactatttgtccgtgcgaatcaaaggcttcttttacatattcgtcatcttgttgctgattttgggaattggcttgctttgcctttccggccagttacgtccggctttcttttatgtaggagaggggctgatcctgttcatcttggtctatctggttttcttttatcgtaagatagtgaaacctttgaacacgattggaagcggtatggaattgttacgcgagcaggatttcagtagtcgactgagccgggtggggcagtacgaagccgaccgtatcgtgaatatcttcaaccgcatgatggaacaactcaagaacgaacgcctccgtctgcgcgaacagaatcattttctcgatttgatgattaaggcttctcctatgggagttatcatcacctcccttgacgacgaactttcggaacttaaccctatggcgttgaaaatgctcggtgtccgcttcgaagatgttcaggggaaaaagatgaaagacgttgactccccgttagccggggaacttgccagtctgccgagaggtgagacagtaaccgtccgcctgaatgactcgaacatttaccgatgcacccattcctcctttatcgaccgtggattccaacatcctttctttctgatcgaaagccttacggatgaagtgatgaaagctgagaagaaagcctatgagaaagtaatccgtatgatagcccacgaagtgaacaataccactgcgggaattacctctacgttggacaccgtagagcaagcgcttaccacggaagaaggtatggaagacatctgcgatgtgatgcgtgtctgcattgaacgctgtttctccatgagccgcttcatcactcgctttgccgatgtagtgaagattcccgaaccgacgtattctcttgtcaatctcaacgacctagtctttgcttgtaaacgtttcatggaaggaatgtgcaacgaccgccacatcactctccgcatggagatagacgaaagtctgccggacgtaaaactggacagctccctgtttgaacaagtgcttgtcaatatcattaagaatgcggcggagagtatcgcaccggaggggaaaagcattgtgcctgaagacgaaagtccggaacccaaaggagaaatcattatccgtaccctgtctcctgctacgatcgaggtgatagacaacggcagagggatcagtaaagagacagaagccaaactgttcagccccttcttttcaacgaaaccgaacggtcaggggatcgggcttatctttatccgtgaagtcctgatgcgtcacggatgtactttctctctgcgtacttattccgacggattaaccaaatttcgtattctttttccttaaatgtgataaatgagaacagttcttccgtcaaacagaactattaattgtcccaaaatacccttacctttgccccgctcaattcaatagaatttaaggtatgagactaatggtaaaaggtgtactaacgctctttcttttcttgactatcagtattccgctaagtgcgcagcagtatatactgcaaggcgtggtgactgattctctgacaaaggaacctttaccttatgcatctgtacgtctgaaagacacgaccgaaggaacgaccaccggaagcgacggacgtttctacttcaagaccagccgttccgaagcagtgctggtagtttcagtgataggctataatgattacagccggcagattcgtcctgcccggaatgcatcttataaaatcgccctttcacccacttcgtattccctcaatgaagtcgtagtaaagcccaaacgcgaacactaccgtaagaaagacaatcctgctgtagaatttgtccgtcacatgatagagcatcgtgacgaccattcgcctgacgaaaaagatttctggcaacgtgaacgctacgagaaaactaccttcgcactgaacaactttgatgaagaaaaacagaaaaaatggctctaccgcaagttcgatttcctcacggaatatgtagatacctccgccgtgaccggaaagccgatccttaccgtatccgcccgtgaattgctcgctacggattattaccgtaaatcccctcatgccgagaaacaatgggtgaaaggccgcaaacaggcaggtgtcgacgagtttctttccaaacaaggaatgcaggcagctatcaacgaggtgttcaaagacgttgatatttacgagaataacatctccttgttcaccaacaaatttgtcagtcccctgtcgcgcatcggtacaggattctataaatattacctaatggacaccttgcagatagcaggtgaacaatgcgtagaccttgcctttactccctttaactcagaatctttcggctttaacggacacctgtatgtgacgctcgactccacctatttcgtgaagcgtgccgtattcaatttcccgaaaaagataaacctgaactttgtcgattatatgttgctcgaacaggaatttaaacgtgccgaagacggtacgcgcctgctcgaccacgaaagtattaccgtagaattcaagctgaccgaaggacaggacggtatctttgcccgtcgcgtagcggattatacgaactacacatttactcccactgccgaagcggacaaagccttcgccaagccggagcgtatcattgaagaaacggaagccctgtctcgtcccgcaaccttctgggcggagaaccgtccgcaagccgctatctccgaacaggagaactccgtggacaagctgatgacgcaactgcgcggttatccggtttactactggacggagaagattctctctatcctctttaccggatacattcctacttccaaagaagcccctcttttctatatcggcccgatgaatgccaccattagcggtaacacgctcgaaggtccccgtctccgtgccggaggaatgactaccgcatggctcaatccgcaccttttcggtaagggttacatcgcctacggcttcaaggacgaacgggtgaaaggactggcggaactggaatactctttcaagaaaaagaaagagtacgccaacgaatttcctatccactcattaaaactacgttacgagtcagacgtcaatcaatatgggcagaactatctctacacaagtaaagataacgtattccttgccctgaaacgcgagaaagacgatcgcatcggttatttccggcaagccgagttgacctataccaacgagttctactcaggtttctccttccaactgacggcacgtcgtcggacagacgagtcctcctacctgattccctttcttcggaaagaaggtgatgtgctgactccggtcaaagaatactccaccagtgcagccgaattgaaactgcgctatgctccgaatgagaagttcttccagacgcagtggaaccgtttccccgtgtcgctggatgctccggtgttcacgctctcccataccattgccggaaagggagtgctgggaagcgattacacctacaaccataccgaagcgggagtgcagaagcgtttctggttctccgccttcggctatacggacgtcatactgaaagcaggaaaagtatgggacaaagtgcctttcccgttgctgataatgcctaatgccaacctttcctataccattcagcccgaatcctattcattgatgaatgccatggagtttatgaatgatgaatatttctcttgggacgtcacttatttcctcaacggctggctgttcaaccgtatcccgttgttgaaaaaactgaaatggcgtgaaatcgtttcatgccggggattgtatggtcatttgagcgataagaataatccggaattgagcgacggattgtttgcttttccgatagcggatacccgtgccatggggaaaacgccttacgtggaagtgggcgtaggtatcgaaaacatatttaaggtattacgcttggattacgtctggaggcttacctaccgtgattcacccggaatagacaagtccggtttgagaataagtctccacatgaccttttaaaagttaaatcctgctaattgcaatgtttatatgacaaataaagactgtattagtaattaattaatcttatttttgcatcaattttagtttaattttaatagaatagaaatgaaacaagaaattaaacccgctaccggacgcctcggtgtgttggtagttggagtcggtggtgcggttgccaccacaatgattgtaggtacactagcctctcgcaagggactggcaaaaccgataggatctattacccagttagccacaatgcgcatggaaaacaacgaagaaaaactcatcaaggacgttgtgcccttgacggatttgaacgacattgttttcggaggttgggacattttcccggataatgcatacgaagctgctatgtacgctgaggttctgaaagaaaaggacctgaacggagtgaaagacgaattggaagctatcaagcctatgccggctgctttcgaccacaattgggcaaaacgtctgaacggtacgcacatcaagaaagctgctacccgttgggaaatggtagagcaactgcgtcaggacatccgcgacttcaaggctgccaacaactgtgaacgcattgtggtactttgggctgcaagtactgaaatctacattccgttgtcagacgaacacatgtcactcgctgctttggaaaaagcgatgaaggacaacaacacagaagtgatctctccgagtatgtgctatgcatacgctgctatcgcagaaggcgctccgttcgtaatgggtgctcctaacctgtgtgtagacactccggctatgtgggaattctccaagcagaagaatgtacctatcgcaggaaaagacttcaagagcggtcagacactgatgaaaaccgtattggctccgatgttcaagacccgtatgctgggtgtgaacggctggttctctaccaacattctcggtaaccgcgacggcgaagtgcttgatgatccggacaacttcaagacaaaagaagtcagcaaactgtctgtaatcgacacgatctttgaacccgaaaaatatcctgatctctacggagacgtttatcataaagtacgtatcaactactatcctccccgcaaggacaacaaagaggcatgggacaacatcgacatcttcggttggatgggctatcctatggaaatcaaggtaaacttcctttgccgtgactctatcctcgctgctcctatcgcgctcgatctggtattgttcagtgacttggctatgcgtgcaggtatgtgcggcatccagacttggttgtcattcttctgcaagagcccgatgcacgacttcgaacaccaacccgaacatgacttgtttactcaatggagaatggtaaaacagacattgcgtaacatgattggcgaaaaagaacccgattacttagcttaatcaggaaccaagaataataaagttgagattgaggtttgccttactgaaaagacgggtggatgctcaacctcaactttttaattagtaacttgtaatttaatgaagaaagctccttttctacctgtattgataggcacgggctttggctccggtttttctccttttgctcccggtaccgccggagcgttgctggcttctatcatctggattgcactttatcttctgctccctttttctgttgtcttatggattactgccgcgttggtgattgtgtttactttcgccgggatctgggctgccgataagctggaggcttgttggggggaagatccttcgcgtgtagtggtggatgaaatggtcggagtgtggataccattgcttgccgttcccgacaatgacaaatggatatggtatgtggtggcggctttcgtcctgttccgtgcattcgacattgccaagccattgggcatccgcaaaatggagagtctcagaggtggggtaggtgtgatgatggatgatatactggcaggggtatatagttttatcttgttagcaggagtaagatgtgtgattggctgagaaaagttgcacggatgatttcccagaagggtggcttcttcatgtttttgagggcgcagctttcggctcaaatggcaactattgcagactttctggttacaattcttctggtgaggctgtttgaagtctactatgtatatgctaccctcgcaggggctgtatacggaggaattgtcaattgcgtaattaattataaatggacctttaaatcgacaggaaagaaaacgaacgttgctgtaaagtttatccttgtgtgggtatgcagcatctggctgaacacgtggggaacgtatgcgctgacggaatcattggcaaagattccttgggtgcgcgatacgctcagtcagtatttcggcgactttttcattatccccaaaatggcggtagcggttatcgtcgcattattctggaattataatatgcaccgcttttttgtataccggaatataaacataggaagtttgttcagaaaaagagattgaaataaaaacagaagatttagataaaaacagatttagacacaatatgaattacagagattatttgcaacagttgatttataagattatcaatcctttgatacacggaatgattaaaatcggaatcactcccaattttatcactacaaccggatttatcctgaacgtggtggcagcaggaatgtttgtctatgccggtatctgtggcggccggaatgaccttgctatcgtcggttgggcgggaggtgttattctgtttgccggattgttcgatatgatggacggtcgtgtggcgcggttgggaaacatgagttccaaattcggtgcactctatgattcggtgctcgaccgttacagcgaactgatgacatttttcggtatctgctactacctgtcgatgaaagattatttcttttatgccctgattgcgtttgtggcattgatcggttcgttaatggtgagctatgttcgtgcacgtgccgaaggattaggtatcgagtgtaaagtaggattcatgcagcgtccggaacgtgtggtactcaccagtctgggagcgttgttctgcggtgtattcaaagatatcacggctttcgacccgatgttgatactgattgtacctttggctttcgttgccgtatttgccaatatcacagctttcgcgcgtgtgagacattgctataaggtaatgatgaaataattgtccgaaaagctaaatagtattggtatattaacaccttattagaatgaaaatagttattgaactgccgtcaaagaatgaagccctgattactgtaatcactatggctctttttcttttgctgacaggtgtcttcatcggacttcgttccgaacatttcttaatggtggcactctatctggtcttattctttgccgggctacccacccgtaaacttgcattagccctgttgccttttgccattttcggaatctcctacgactggatgcgtatctgtcccaattacgaagtgaacccgattgatgtagccggattatacaatctggagaaatctcttttcgggatcatggacaacggtatcctgattaccccgtgcgaatatttcgctgcccataattggccggttgcagatgtctttgccggcatcttttatctgtgttgggttcccgtgcctatcctgttcggtctttgcctgtacttcaagaagcagagaaaaacatatctccgctttgcgttggtatttctgctggtcaacttaatcggctttgccggttattacattcatcctgctgctcccccctggtatgccattaattacggtttcgaaccgatactgaacactccgggcaacgtagccggtctgggacgtttcgacgctttcttcggtgtgacgattttcgactctatctacgggcgcaatgccaatgtttttgccgcagtgccttcgcttcatgccgcctatatggtggtggctctggtatatgctatcattggcaaatgcaggtggtatgtgattactctctttgccgttatcatgctgggcatttggggaacggctgtttattcctgtcaccactacatcattgatgtgttgctcggtatatcctgcgcattactcggttggctggtgtttgaatacgggctgatgaaaattccggtatttaatagattctttgacaggtattataagtatataaagtaaaatatacaggtatataagaagcagtgaagaacaagtaccgcaatatattcctcgcttttggcatcattgccgtcctgataatgatattcacattcgatatggattatcgggaactttgggtgaatctgaagcgtgcaggaatatatttgcccttggtcttgttgctttggctgtttgtctaccttattaatacgctgtcatggtatatcatcatccgtagcggaggcaaaccgggcttttccttttcccggctttataaatttaccgtaacaggctttgcgctcaattatgtgacacccgtcgggctcatgggaggcgagccttatcggattatggagctgaaaccctttatcggaatcgaaagggctacctcttcggtgattctctacgtgatgatgcacatcttctcccacttttgtttctggctgacttccgtcctgttgtatgtctgtctctatcccgtagggtgggtcatgagcgttattctgggagctatcactttattctgcctgctggttaccgtcctttttataaaaggctaccggcacggtatggcagttgcctttatccgcatgggtagccgtctcccttttctaaagaagaaagtacttcattttgccgaaacccataaagagaaactggaaaacatagataagcaaatcgccctccttcaccggcagaagaaacgtactttttattcggccctctttctagaatacacggctcgtgttgtcagttgccttgagatctggctgatacttaatgtgctgacaacaaacgtcagctttgccgactgctgcctgattgctgccttttcctccttgttggccaatcttttgttcttcttgccgatgcagctcggtggacgtgaaggaggctttgcacttgccgtaggtggtctctccctttccggagcctacggggtttatgctgcactgattacccgtgtccgcgaaatggtctggatcgtgatcgggcttgctctgatgaaggttggaaacaggaaaggaaattagccggcatactgcgtcaattttaagccggaaaagaaaattctcgtttggctttgaaaaatgatgcttcttcaaatttggtggtaatttaactagtcggtggtatctccattcccctccttcggggaaggaggggtggctgaaagccggggtggtaggtggatacacaatgttgataataaccgacttacgcattcacctaccacctccccctacggggactcctccttcccgaaggaggagaatggagaatactatcgactatcaaattattgttgaatactatcgactatcaactttcaaattattattttcctaattaattttaccaccaaatttgaagaaaaacctgaaaaataaggaagtatcgtttggatagctcgtgtgaatagttaactttgcagttactaacatcttaaaaataagaacatgagaaaactaactacctttttgttgcttctggcaatgttgattccaacggccggagcgcagtcaaccgacatctttaaaaagaagaaaaagaaaaacagtaagacggaagctgtcgacaaagcgaaagccgactccatagcgaaagccaagaaatctcctttccaaccttatgcaagcgtgatcaccggtaaagccaagactatgaacggtttcttcaaggtgcactgtatagaaggaaaatacttcttcgaaatccccgattccctgtttggacgggatattctgattgtcaaccgtattgtaaaggccccggtggacaaacaaaaacgtaaagctggctatccgggcgaccatatcagcgacgaagtgatacgtttcgaactgggacgggacaacaaactgtttatccgtcagatctcttatctggaacattccaccgatacactgggaatgtatcaggcagtgctgaactccaacgtgcaacctatcgttgccaccttcccgctgaagacgatgcgcaaggacagcctgacgaaaaactatgtgatcgaaatgaccgactttatccgcagggataatgatatgttctctttctccaactatgcgaaagataatatcggggcgacttcaatgatctccgacgccagctatatcgacaccttgaaagccttcccgcagaatatcgaaatccgcactgtgcgcaccttccaacggaaaccgcctatgggcagcgctcttgagaaaatgattgctcaatactacaactccaccggtccgatgacttacgaactgaacagctctatgctgctcctgcccaaagagccgatgaaaccgcgactctatgacccccgcgtaggctattttgctgtcggctataaagactttgacggtaacccgcacggtatgaaatacaaagcgaatatcacccgttggcgtctcgaaccgaaagacgaggacaaagaaagatatctgagaggagaacttgtagaacccaagaaaccgatcgttatttacatcgaccctgctactcctaagaaatgggttccctacctgattcaaggtgtcaacgactggcagaaagccttcgagaaagccggattcaagaatgccattatcggtaaggaagcccccacggacgatcctacctggagtttggaagacgcccgtcactcggctatcgtctataagccttccgacattccgaacgcaagcggtcctcacgtacacgatccccgcagcggtgaaattctggaaacacatatcaactggtatcacaatgtaatgttgttgctctacaactggtatatcgtacaggccggagccatagacccgggggcacgcaaacctcagtttgacgatgaactcatgggcgaattgatacgcttcgtgtcttctcatgaagtaggccacacactcggcttgcgtcataacttcggttcttccgctaccgttccggtagagaaactgagagacaaagcatgggtggaagccaatggccacaccccgtctatcatggactacgcacgtttcaactacatcgcccagccggaagacagcatctcacgtgccggaatcttcccgcgcatcggtatctatgacgattggtctatcgagtgggggtatcgctggatgcccgaattcaagacggcggaagatgaaattcctcacatgaacaagtggattatcagtaagctgaaagaagacaagcgttacaccttcggtacggaaagcgaccgcgacgatccccgcaaccagaacgaagacttgggagacgatgctatgctggctggtacatatggtatcaagaacctgaaacgtatcatgcccgaaattataaagtggacgtacgagccgaacgaaggttacgagaaagcaagaactttatatagtaatgtcgccggacaattctctctgtatatgggacacgtggcgaccaatgttgccggtatttacagcaccccgatttcggtagagcagaccgatgtgaaagcagtggaatttgtgccgaaagagatacagaagaaagcaatggccttcctgaacaaagaactgttcaccatgcctacctggctaatggatagccaactgttggagaaagcccaggtcaacacctccagttttatcttcagtgtgcagagtggcatactgaaaggcttgcttagcagccgcacattggataaaatgacaactaacgagttgatgaacggtacgaaagcctacacttccgctgagatgttccaggatttgagaaagagtatctggaatgatctgagaggagggaaaagacccgacctcaatcaacgtgccttgcagaaagtctatgtcaactcattgactgcaatgctcgagaagccgaagacgaacgccaatcagtatatgcccgattctctgtcggaagcatccgccattgcccgtgggcaactgacagatctccggagagaccttgtcaatgcagcaagcgcttccggtggcatatacagaagccattacctgaacctgaaagcattgattgatactgcattcgaagcaaaataaaaggttgcttcttcaaatttggtggtaaacttaattaggaaaataataatttgaaagttgatagtcgatagtattcaacaataatttgatagtcgatagtattctccattctcctccttcgggaaggaggagtccccgtagggggaggtggtaggtgaatgcgtaagtcggttattatcaacattgtgtatccacctaccaccccggctttcagccacccctccttccccgaaggaggggaatggagataccaccgactagttaagttaccaccaaatttgaagaagaatcaataaaagaaagaatttctttttgaataaacaggaaactccaactaatccgactttatcaatcggttagctagagtttcctgtttcatctttttagagaaaggagagcgcttttctcagtttacaccttcccccaatccttttcagcattaaagcagggacaagccttgatccattcttccggttctatctcaccatttccgttcaggtcgggactgaggtcgcgatgtccgcagatgcggcagcccgggtaatccttcaataaagtgagaatcagcacacgcatcgaatgtttctgccattcggtacgggtatctttgggatgtcccttgcagtcgagtccgccttcgtagcagataccgatactttctttgttgaagccacgggtgtgtgcgccgatgcgttcgagaggtcgggtcgatttgatatccccatttttgcggatataaaaatggtatcccgttccgttgaatccccgcctgcggtggcagatatccaagtcatattccgtaaactccctgtcctcacgtgtagcggaacagtggattactatcaactttataggtcgcatacgttctctttcacagcgcccgttgcgtacaatctttattgctgcattgcagggctgccgcttgtgcaagttgtccccgcagtgaaaagatctccgtatgcatttccttcactctcgaactaaggtcaaaataatccttcaacaccttctccaattgctgcatcagaaaagtatattggtctttcaccagttcgctgaactcttttacctcctgcgccatgactttgcgcttcttgcggctgctgcccagaaagggcagcaccgtcataatgatttctataatcttatctaacatgaatgtgatttattaatgaagaatacctttaaacagacgggtcgggagtgacaccaccgccgcccggtttatcatttccgccgttttcgtcatcggagccgtcggtttcgccttcgcccttccccgcaaggacgaaatctacattattctcacttcgggtggcagtgtggctggtattcaccaggtgcagcgccttgtccgccacgaaacggacattcacccggcggatactgcgcaccgtgcaatctttttccttctccgtgccctcgctgctcaacgtgatgtggaacgtgcccaatccgtcgatcttcactttatcgccctgcgtgagcgacagacgcaactgctctacaaaagcctcgatagcgtgcttcacatctcccgctgtgagcgaagaattcgcctcgatcgcatccgccagcttattgacgtccataactctcacagtacccgatttctggcgtacataatacaacacctgcgaatcttcctgattcacatactttctgcgctgatagcgctccactaatacgttcataattgaaaaaagttaaggtttaagtaataatattttctgtcattattgacattacaaatatacaaaatctgaaaggagaagtcaagtattttgccatttattttatactgatttttgaaataaaacaaggcacggatgattgaaaattattgttgtataaaattgaatctatctcacactggaatcacttttactttgcatgttttagcagaaactccaatggcggtacatagtccgtaatttttgtcatttccggattatgcccgaaataagcgttcccggtttccccgttgcgttgtttggctacgattataatgccgagcccttcggtgggataaccgctttcgcggtcggtcggtatgcgtgcgagggcagggcggtagagtagtaacacgacgtccgcatcctgctcgatcgctccgctctcgcggagttgtgacagttcggggcgaccggcgggacggccctccgacacacggttcaactggctgagcaacaccacaggcacattcagttctttggcaagcagcttggccttgcgggtggcttgcgccacttcctgctctcggttacggttgttttgtcccgtcgtcatgtcgcatagttgcaggtaatcgatgataatcatgttgcacttattccggctttgcagcagccgggcgctgcaacggatgtgttccatgttgaccgatgtactgtcatctacgtgtatcgggagacgtgcgaggtcggcggctgtggcgtgtgcttctgccagttcctgcgtgctgactgttcccgaccgccaccggcgggcgctgatctcactggctgccgtcagccagcggtcggccagcctttccccttgcatctcaagactgtagacggctacggcatatcctgccattgccgcgttccgtgccagatgcaatgccatgccggttttccctacaccgggacgggcggcaagtactattagatcactgttctggagtccggacgtcatgcggtccagatccgtcagtccggtgggaatgccggtcactccgttcgtactcttggcgatacgtccctcggcttcggtcatggcggcgctcatcagtgcgtccatgtcgcgcaggtgggtgttgtggttgaactcaccctccaggcggtcgagcaggttgtgtgcatctatcagcgagtcgtcgatatccatggtttcgtccagcgaacaggcgagaagtttgttgaagcccaggatcatttcgcgccgcaggtatttttcgtgcacaatccggatgtggtattcgatgtgtgcggaacttgccactttactgctcagttgggtgataccatacggaccgcccgcttcttcgagctttccgcggtgtgaaagttcctctttcacggtgaggatgtcgattttggtacccgcctgatacatcgccagcatggcggcgtagattatctggtggcgtagcacgtaaaacatttcggggcgtagcttgtcggctaccagcggcatggcttcctgttctatcaggcaggcgccgaggatcgcttcctctatttcgggtgcttggggcgaaactctgttttcggtattcatcattaataggtgtattcgttcaggaaagctttgttcgataaataactgccggcatggaggaggaagttgacgttcgtctggtggaaataatatacttcgatgttgtcgattgccagttgttgttccttgtcactcagcttcttccactcgcgttgcgccttggcgatgttctccttgggaagctgcgtgatgctgtggtattcgttccagaacagttggaacttctcgttgacagctttctttttctgtttcccggcatcgggcagtcccacccatttgtcatattcgacgacgcgtatgtgcagggatgtattgttggggtgggggatgatttcgatgattccccgggtggcaagtccgtgcatgaagcggaaagtcttcccggtggaccagtggagaacgcggctccagtcgcggtaactgaacaggctttcacctcttttgcacgggcagttcttgttgcagcggtcgttgtatagcgtttccgaatagttgactttcatcaggattttcaggagtgcctctatctctccctcttgcaggtgcggattttctatctgttgttgcaataaggttttcgggataatgagaaaaccatgctttgtcatggcttggaaattaaatttgttcattttggcttatttaaaattttcggtaaaggtaatccctttgcgtatggcttgcaagaggcgttgtggtgtgtggatgactgtggacggttgcggacttcgaatgtacttccgctaactgttttttctctctgcggatgttctccggaggggatgatgaaacagatactccgtttctgtccggcagagcctttgatacagacaaacagagccttcgttcggttgaatcggaggctctgtcttagttgaaaaatacggtcgtttttacgaacactttgtggaacattttttcctactgcaaatagctgtatttttgagagttatctttctgtgggaaaaaatgccgaacgcaaagtggaatacataataaacgataaaagataaatgatatatttaaaaatatatagttcgatttttcttttatttcttatccgtgtttttgttttctgctacgcgctgtactttgaccgacagtataatgtggggcggtccccaatggcggtagatgattagctgcatttcggggctgatctcgatcgtcgtgtcggtgtagtgcgcgtcggcaagttgttcactcaaagcattacttgctttgatacaattacgcatttttttgctggcggacgatgtacttgccatttgagggaagtatgccactgccaaatcggaaaaatgcttgaaaccgttaatgctgtagctttcgtcagctacttcattacttttcataaatttacaatttaattgtttcttaattatggcttttgtcttaaaaaccgcacaaatatatgaaaatatatttgataaataacatgaaagttttagtttttatttttgtaaatttatgtatgtaaatttttatatattgatttttttgttttactaaagtaaagtgtgggaatagtaaatattattaattaaattatttgttgatgaagaaggaaagttttacttcgtttatgaaacaagtggctgccgatttgcagcagagtggaaatttagggactgctcatgtgtatagaagtagtttgaatgcgattcttgtttttcaggaatcggaaagcgtggagtttcgggaaataactccggagtggctgaaacattttgagggtagccttcgtgcccgtgggtgtagttggaacacggtgtctacgtaccttcgcacgatgcgtgccgtttacaatcgggccgtcgatcttcatcgtgcgccgtacgtgccgcatctgttccgttccgtatatacaggtacgcgggcggaccgccggcgggcgttggatatggaagacatgaagaaggtgtttgcccgtctgttgcagtcggccgccatacctcccggcatgaggggtgcgcaggaattgtttatcctcatgttcctgcttcggggattgccttttgtcgatctggcttacctgcggaagagcgatcttcggggggatgtcattacttaccgtcgccgcaaaacgggtcgtccgttgtcggtgacgttgacgccggaagccatgttcctcttgcagaagtatatgaaccgtgataagcgttcgccttatttgttccctattctccgcagcgccgaaggttcgccggaagcttatcgggaatatcagttggcattgcgccatttcaattatcagttggaactattgggaaggtttttgggattgaaggatagattgagctcctataccgcgaaacatcatacaatctctatctaattgaaaattaaacagttatttctgtttaattaatatcaggtaacgatttagaaacgagcgaattacaatattctgttttcttttgcctctgtcaaagaacgattctttcaatgcaaatatacactttacttgtgacaaaagcaatctttttctacatttaatcgacttacagtcagccttaaagagggtatctggtctcattccatcttcttcctcaaaaataacatagcagtctaaattggtttatgtatgggataggtcttgt

SEQ ID NO: 3120 - DNA, 297 bp, Unknown
  gut microbiota DNA sequence
tatatatagtcttgaataatgtaatgtggcttaccagcattgcaatgtgttatttagattgctttattgacaacttaaactacacatttcaagatttcctaattatcttctttgaacttctcgcacgtataacacttgtaataggagcaatcagtatattcccacaagaaccatactctaataaaagaatgtggttctattacatcatcatgggtgggagtttgactattattgacacatttatacgattggcaggtactttacaaaagttattattttaattccttttgaagaaaa

SEQ ID NO: 3121 - DNA, 198037 bp, Unknown
  gut microbiota DNA sequence
tataacagattgtattgacggttctatcttttcttgtactacttgtattgtttatcaatatttcaaagaactaatgtggccttcgccgcactgctttctttacgaaagcggatgcaaagataaggactttttcagataacatccaaacttttttcgaagttttttggtttttattttccgaaccctttatcattagcagaatgtcaatcattaggctctgtctctctagcaaagcgggtgcaaaagtagacaacttatccataacatccaaatatatatgactatttttctaatcttttttgaaacttttttgtaacacgctgattgacaaggatgttgtagaacataaattttactgcagggagaacccatgtagaatgactacacattattatattcacacgcgagaggaagggaagggaatgagactgtagaaaagaaataagtactgtaagcaaatttattcggtttctcaaaaaacaatgctgatacataaagttgataataaccgattctggcattcacctaccacctccccctacggggactcctccttccagaaggaggagaatagaggatactatcgactataaactagcaaatcattattttacagattcaacttacaaacaaattggaagaaaaactgattcatcaaattcatttctcatattctcatactttcggaataacgcgtttattatcagataaatgatgtatgagaaataaaataacagacagccatttctcatagtattcgggattatttctcatagaattcgttgtgttctcatatagcttcataaatcaaatttcaatatacgacacatttgaactaatattaaattgtagaatatagactgttaaataaatggtaaataccttatagttagagactcttcacctatttataacagataatcgataagacatataattcgttccactacagtgaatagttctgcgcactctagtagcaagaaccggctactagagtgaaaaagcctgtgcactgaagtggaacaaaagagatgatagtagaaattcacaaggataaaggcataatataacaagggcattaggatagaatatggtatgtaaagggaagacttcagaaaaagaagcatatatcaggagaacaatatggagtagtgagaaaaagaacggggggctatgagaaataaagaagaaagagtatgagaaatgactgaattatgagggaaaacaacagaaaaactatgagaaatacctctgtgttattttatttctcatacatcatttatctgataataaacaagttatcccgaaagtatgagaatatgagaaatgaatttgataaattcggttcttcttcaaatttggtggtaatttaaccagtcgtggtatctctattcccctccttcggggagtggctgaaagccggggtggtaagtagatacacaatgctgataataacagacttacgcattcacctaccacctccccctacggggactcctccttcccgaaggaggagaatggagaatactatcgattatcaaattattattttcctaattaattttgccaccaaatctgaaaaagaacctttactacatgaatcagacgagaaaccaaagaattattctttctgttaaaacctccacaagcgataaacaaaaatatcccccggctgttacataggcaacttaaacatattaacctaaacataaaaattatggctagagaaagtgtaaaaatcctacaagggaaattggatgtagaaagtttgatttcacagttgaacgcagcattagctgaggaatggttagcatactaccagtattgggtaggtgcattagtagtggaaggcgctatgcgtgccgatgtacaaagtgagttcgaggaacatgccgaggaggaacgccgccatgcacaactactcgccaaccgtatcatcgagttagaaggagttccggtactggaccctcaaaaatggttcgaactagccagatgcaaatatgatgctccgcaagagtttgattcagtaagtttattgaaagacaatgtggcttccgaacgttgtgcaatcattcgttaccaagaaatcgccgactttactaacgggaaagattttaccacctgtgacatcgcaaaacatattcttgctgaagaagaagaacatgaacaggatttgcaggattatctgacggatattgtcagaatgaagaaatcatttctcgaaaagtaaattctaatttaataatgattaggtaagagaggggcatccatttacaggatataccctcttttatgtatatagtacgataaaaacaaaactattttagagtaaatcaagaagaaatctttcttttttcgtatttttgtcccaatatgcacgtttaatccaaataggtaacgaacatttgcgaagagaatgaaagtaattgatttaataaataacagcaaaaaaacagccttttctttcgaaatcctccctccactgaagggtacggggattgaaaagttatatcaaacagtcgatacgctccgggaatttgacccgaaatatatcaatatcaccacgcatcgcagcgaatacgtatataaagacctcggcaacggcctgtttcaacggaaccgtttgagaagacgtccgggaactgtcgctgtggctgctgccattcagaacaaatataatatcaccgtagttccgcatattctgtgcagtggtttcacacgcgaagaaactgaatatgtactgcttgatctccagtttctgaatatcaccgacttgttggtgctgcgcggagacaaggcgaagcatgagtctgtatttactccggaaggcgacggataccaccacgccattgaattgcaggagcaaatcaacaacttcaataagggaatctttgtagacggttcggagatgaaagtcaccgccagtccgttctcttatggcgtagcttgttatccggagaagcatgaagaagctcccaatatagaatccgacctctattggctgaaaaagaaagtggaagcaggtgcagaatatgccgtgacgcaactattttatgataataagaaatatttcgaatttgtggaacaggcaaaggcggcgggtatcaacatccctatcattccgggaatcaaacctttcaaaaaactatcccaattaagcatgattcctaagacatttaaagtggacttgccggaagatttagtaaaggaggccttaaaatgcaaaaacgatgctgaagccgaacgggtcggtatcgaatggtgcgtgacacaatgcaaggaattgatgtcccacggagtcccaagtattcatttctactctatcggagcagtagacagtatcaaagaagtagccaaaatcatttattgatatgttttttagagacgtaatcggacaagaagaaatcaagcgacggctcattcaggaagtgagagagggacggattccgcacgcccagctcatctgcggcccggaaggagtcggaaaaatgccgttagctattgcttacgcacgttatatcagctgcaccaaccggggcgagactgatgcttgcggcgtctgtccgtcctgcgtaaaattcaataagctggtacatccggacgtacattttgttttccctatcgtcaaaagtgcgaaggggaaaaaggaggtatgcgatgattatatcgccgactggcggccgtttgttatcaacaatccctatttcaatctcaatcactggctgaacgaaatggacgccgaaaactcgcaagcattgatttatgccaaagagagtgacgagatattgaagaagctcagtctgaaatccagtgaaggcggatttaagattacgattgtatggctaccggaaaaaatgcacccggtatgtgccaataaattgctgaaattactggaagaaccacccgagaagacggttttcctgcttgtatcggaagcgccggatatgattctgccgactattctgagccgtacacagcgtatgaatgttcggaagattgacgaagccagtatcgaccggatattacagtcaaaatatagcattcagcctgccgacagtctttccattgcccacctggcaaacggtaattttataaaagcgcttgaaacaattcatctgaacgaggagaaccaacagttctttgatttattcgtcagcctgatgcggttgtcttatcaacggaaaatcagggagatgaagatgtggagcgagcaagtggcaggtatgggacgcgaacggcagaagaactttctggaatattgccagcgcatgatccgggagaactttatcttcaacctgcatcaacgcgaccttacttatatgactatcaacgaacagaattttgcaatccgctttgctcctttcgtcaacgaacgtaacgtcatgggtatcatggacgagctaagcgaagcacaactgcatattgaacagaatgtaaatgctaaaatggtatttttcgacttctcattgaagatgatcgtactgttgaagcaataataaatatataaactatggaatataaacttcataatgggagcggcagcctttgttgcaaaggatgctcccgccaagataaaaagctgaacacctacgattggctggcagacataccgggcaatgcggaagaaagtgatatggtagaggtacaattcaaaaatacccgcaaagggtattatcgcaacagcaataaaatcaaactggaaaagggagacattgttgccgttgaagctgcccccggacatgacattggcgtagtaacccttaccggcagacttgtccccctgcaaatgaagaaagccaacttcaaagcggatgcggaaatcaaacgaatctaccggaaagccaaaccggtggacatggagaagttcaacgaagcaaaagataaagaacacgctaccatgatccgtgcacgccagattgcattgaacttgaatctgaacatgaaaatcggagatgtggaatatcaaggagacggtaacaaggctatcttctattacatcgccgacgaacgggtagacttccgccaactgattaaggtattagccgaagctttccgagtacgtatcgagatgaagcagatcggtgcccgtcaggaagccggacgtatcggtggaatcggtccttgcggacgtgaactttgttgtgctacctggatgacgagttttgtttccgtatctaccagcgccgcacgtttccaggatatctcactcaacccccagaaacttgccggacagtgtgcaaaactgaaatgctgcctgaactacgaagtagactgttacgtagaagcacagaaacgtctgccttctaaagagattgagctggaaaccaaggatggtactttctatttcttcaaggccgacatcctcagcaaccaagtttcttattctacagataagaacttccctgccaacttagtcactattagcgggaaacgtgcttttgaagtgatcggcatgaataagaagggtatgaaaccggacagcctgcttgaagaagaaaggaaagcggagccgaagaaaccgatagacttgttggaacaggaaagtgtaacccgtttcgaccgtagccgtaataacagtaaggaaggcaataacgccaaccgaaacaagaaaaagaaaaaaggaactcccaacaacaaccgaccgcaacaacaagtagaagggactaatcgtccgcagcaaccgcaacgggaaaacgagggtcgtccacaacctgcggaaaacggaaacagaggagatcgggaaaacagaccaagaaataataataacaaccggaacagaggacaaaaccagggacggaataatgagaacagacgtccggagagaagacaggaacggccacaaaaccaggaacgcccgcaaggtcaggaacgtgaacgccctgcaagaccagaacccagaccggaaagatacccaaatcaagcgaaaccgcaaaataatgaaaagccttctcaggaatagtttattctgtctgctcggtatttgcctaatggctgcctgcaatgagaataccgtgtatcactcctatcagtcccttcccgacgaagggtggggaaagagtgatacactctcttttctgattcctgtcaccgacagtattccgcctacactcagattattcgcggaggttcgcaacagaacagattacccttatcataacctgcatctatttatcagtcaaaacctgcaagactctacggtatggcggacggatactattactataaacctggctgattccacgggaaggtggatcggaaatggttggggaagtatctatcaatcagcggtctttatcaaatccgtacgtcctttgtatcctgctaattacaccttcaaaattatgaacgggatgaaagatgagaagttgtccggaatcaatgacattggtatccgaattgaaagacaggagaattagaaaataaacgaactagagtctcctgccgcgccctgcatctatccgcaggaaaataaacagcaatatcgtaaatccccataaagaagaacctccgtaactaaagaagggtaatgggataccaattacaggagtcagccctaacaccatccctatattgataaataggtgaaagaggaaaatactcacgaccgaatacccatatacgcgaccgaaagcagacggttgcctttcggaaaggaatatcaatctcaatatcaaaataagaaaagccagcaagaccgcggccgaacctacaaacccttgttcctctcccaccgtacagaaaatgaagtcggtatcctgctcagggacgtatttcaatttggtttgcgttccgttcaaaaagcctttccctgtcaatccgccggaaccgatagcaatcttggactggtttacattgtagccggcaccggttaaatcttcttccaaacccaatactactttaatacggatttgctgatgcgactctaatatattatcgaagacatagttactggaatataagaatccaatggagccgattgagaataaagcaatcaggaaataagagcgctgacgctcgctcaatgccaagtaaatcaaataacctaccacaacgacacaaagcccccactgcacccagaccagactgaaatggatccaatattcggatatcagataagcgataagcaagacaatcaaacttcctccgataatattccgggcaggttcccaccgcttgcggtatacccacaccataccaccggcaaataataagatcagcagcaacacaataaactctcccaacggagtcggtgtatcggctatgaatacttcatcgaagcggatgcctaccacaaaatagatgaccgcacatacccccgaaaaaagtaccacacccggcattccctcccggtaaagcaccaagaagaaagcaagatagaccaaggcagaacctgtctcccgctgaccgataatcaacaacatcggaaggaggataataaaacccagtaccagagcacatttctctttctttatgctgaatgaataggagtttatatatttggccaatgccaatgcggtagcaaacttggcaaattcggctggctgcaggctgacaggccccattaccaaccaagaacgggagcctttggtatccggcgcgataaaaatagtaacgataagcaaaattatcattcctatatatataatgtacgcgaacatatcatacatccggtcttccaacatcaacaacacgaaaccgagaccgaaggaacagataatccagacaaattgcttgcctgcacgggtagagaagtcgaggaagtcacgatcaccatagtcatagctggctccacagacactgaaccacccgccgacaatcagaagcaggtaaatgcaaatcgttacccaatccagtgatttccacaaactatcgttcctcgttaccatacaatatcactctgttactaaattcttctgctctcaattcattctcgggagatagtttgcctttcaagtactgctccataagcaatgccccgaaaggtactccgtatgtagctccccaacctccattctccacatacacagcaatggctatcttcggcttgttcatcggtgcaaagcccataaatacagaatggtcatgtccgcggttctgtgccgtacctgtctttccacaagcttccaagtccggaaccattaccgacaacatacggcaagttccgcctgtggcagctccgcgcatcccttccaccaccgattcataatgccgtttctcaattgtagtataacgtggcgtacgataaatactatccaactgattatcttgaatctccttcacaatatgcggtgtgataaaatatccgcgattggcaatcgttgcacccagattggctatctggagaggagtagccagaatttctccctgcccgatcgaaatactgattaccgtcagtccattccaatggccgcgataagccttatcatagaactgtgcattcggaatcaaaccacgtttctctccgggcaaatcaacacctaacttataaccgaagccttgggaaaccatgtgatctttccagactgtaattgcgttttgcggtgaaccgtatttacggtcgccgaacatacggaacagtccccaacaaaaataagagttgcacgatgtagcaatagcaggaataagtggtatcggtgctccgtgggcatgacatcccaccgtcagtctgccgtaatggaaaccgcgcgaacaagggaaagaaggaccctgctcagtcacaatgccttcctgcaaaaaagttaatccctgtgccgtcttaaaagtagaacccggaggatatactcccatcaatgcacgattcagaagcggtttcatcttatcacgctgcaacatcagatggttctttccacgctgacggccaatcatcaaatgcgggtcgtaattcggcgaagataccagacaaagaatctctcctgtctccggctcaatagcaacaatacttccgatcttatttttcagtaaccgttcacccaacatctgcaagtcaatatccaaactgagtgtcaagttctttccgggtacggaaggacggtcatattctccgtccatataatgcccctgaatacgtccgtgcgcatcacgaagcagaatttcaatgcctttctctccacgcagatacttctcatacgatttctctacacccaacttaccgacataatcgccacgaatgtagtagccttcttcatcggcttccatttcttttgccgagacttctccaatatcacccaaggcgtgcgcggcagcatcataagagtattggcgaatcgtacgccgctggatatagaagccacggaatttaaacaacttctcctgaaagacgccacattcttccgccgaaagttgcgacataaacaattgattagtgtatctggaatatcccggattccggcgacggtctttcatgtcgctcatgattttcaggaattgagcacgagtaatattcaacgactggcacaggtcgagtgtatccaagttctctacttctttcgggacaatcgttatatcataagcaggctggttaaaaaccagcaacttacctgtacggtcatagatagctccgcgcgaaggatattgaattttattcaggaacgcattgctatcggcgttcttcttataatcatcggtagtaatctgcaatacaaaaagacggatcagataaatcagcacaatagacagtgcaattcccccgataacaaatttccgtttctccagtctataatcttttgccatcgctatctccttatgccttccacagctacaatacaagttacagtcagaacggtacacaatgccacccgcagcagcaacagccaaatgccggaaaacgagaagaactcaatagagagtaaagccagactatgtataaaaacacttgcagtagtatatttcagaaaaggagtgattcccatactcttgaaagaaggtacgagattgtcctgattatcgcggggagtgaacaaacgcaataaagaaggacgaagaaaagcaagcaacacggttgctgctgcattcattcccggagtatcggaaaacacgtcaatggtaagcccgaaaaagaaggcccacaacatcagttcattccgggaagtgccggaattgaacttcaaaataaaataaatatagagaaaaggcgtagcatatccggctatatgcacattattcagaattagcacctgaagaagcaccaacccgataaaccaaccgattctatgtatataggtaataatcattgtttcgttgtcttgttttcgagttctttctgctcctgctgaccgttccgcgctatcacccgcacatcactaagcttgccgaaatcggtagccagcttgatcttcagcagataggataatccatcatgagagtcggacatatcatccaccgtccccaccataattccttcgggaaatacagtcgagaaaccgcttgtcactacggtatctcccagattaaactcggcatgacgaggcaaatctttcagataagcgtatcgcgaatctccgtgttcccacttcagataaccaaaataatcgcttcctacaatcttgcaactgatgtttgatttgctattcagtacagaaatcaccaccgaataggaaggagatgtttcgtaaacaattcccacaatcccgtttccgtctaccacgcccatttcggaatgaatgccggaagaagaacctttatcaagcgttatataattatcggccaggttcaggctattcttaatcacacgtgccttaaacagctgataatctttctgaggcatcttccggatactgttcaccgcgatagaatcgagttgacgttctttcaacgctttttccaaattattgatctgctcttccaataacatattccggtccagcaggtcttcattgaccgatttcaggtggaaataggaagatatacctcccgaaacttcataaaccgcccccacaactgtattggcagaagtgaaataagcactctgctggtaattgttgaaccgaaataacaaaacaaaactggctacctccaatatgacaaagaggaaccagtaattgtatttcaaaaggaagtttattaaattccgcatgaatcagagtccgtgattttatctcattaggaaagagaaacgatctacattctttaatgctacccctgtccccttggcaacagcgtgtaaaggatcttccgcaatatggaacgggatatttatcttatcagtcagtcgcttatccaaaccacggagtaacgcaccaccaccggccagatagataccattatgaacgatatccgcataaagttcgggaggagtattctccaatgcactcaagatagccgtttcaatcttggaaatcgatttctccagacagtgagccacttcctgataacataccggtacttccataggaagggcagtaatacggttcggaccgtgaacgatataatcttccggagcgtcttcacccagttcggtcaaagccgcacctacattaattttgatacgttccgccatacgctcgctgaccttcacattatgctgacggctcatatattcttgaatatccgcagtcaagtcatcaccggcaatacggatagagttgttggaaacgatacctcccaaagagataacggcaatctccgtagagccaccacctatatcaacaatcatgtttccttccggagcttccacgtcaataccgataccgatagctgcagccatcggttcgaaaatcagatagacatcacgtccaccggcatgctcggcagagtcgcgaacagcacggagttcaacttccgtacttcccgacggtacgccgatcaccatacggagagagggtgagaaaagatgattgcgggtgtttacctgcttaatcagaccacgcatcatctgctcgcaagcatagaagtcagcgattaccccgtctctcaacggacgaattgtacgtatattttcgtgggtcttttcatgcatcaacttcgccttttctcctacggcgatcatcttatccgtacggcggtccaaggctacaaccgaaggctcatccaccacgattttcccgttcgtgatgataatggtattggctgtacccaagtccattgctatttcttgtgtaaaagagaataatcccattcttgattcttgtttttaatgtttaaaatgacggataccggtagtcaccattgccatgccatgttcattgcagtaagcaaaagacaaatcatctttcactgaaccacccggctgaattacagctgtaattccttctttatcggcaatttccacacagtcagggaacgggaagaaagcatccgaagccattactgcaccattcaggtcgaaaccgaatgatttagctttttcaatcgcttgcttcaatgcatccacacgtgaagtctgtcccacaccgcttgccaacagttgtttacccttcgccagtacaatagcgtttgatttactattcttgacaatcttgttagcaaacagcatatcctctacttcttccggagtaggagccttgtcggtcactgttttcaagtcggctaccgtttcaatattagtatctttatcctgcaccaatacgccgttcaacaaagcacggaactgcttcttcggcagtttggcctccttacgtacaagaatgatgcggttctttttctgtcccaggatttcgagtgcatccacatcataatccggtgcgataatcacttcgaagaaaatcttgttaatttcttctgctgctaccttgtcaatgacaccgttagtaatcagtacaccaccgaaagcagatacaggatcacctgccaatgcatctttccaagcctccaacacagtaggacgggaagccaggccgcaagcgttattatgtttcaggatagcgaaagtaagatcctcgaactcgtcgatcaagtcaacggcagcgttgatatcaagaagattgttataagaaatttcttttccgtgaatctgatcgaacattgcctccaggtttccgtagaaataacctttctgatgtggattttcaccgtaacgaagttgtttctggctgttcaccgaacaacggaaggcagaaccttcgccggcatcgaaataattgaagatagccgaatcatagtgagaagaaacggcaaacgcttcttttgccatccaacggcgttcttcgagtgaagaagtggctccgtgctccattaacatatccagcaatggcttatactgagcctgagaagctacgataattacatcgttgtaattcttggctgcggcacgaatcaaagagattccgcctatatctattttttcaataatatccgcttcagatgcaccggaagcaacagttgcttcaaacggatacaaatcaacaattaccagatctatttcagggatctcatatttctcaatctgctgcatatcttgttccagaccgcgacgacaaaggatacctccgaagatcttcggatgcaatgtcttcactctaccacccaaaatagaaggataagtggtcaaatcttccaccgccttacagggatatcccaacgattcaataaactgacgagttccccccgttgacagaaactctactccctcttcatgaagtttggtaataatttcgtccaaaccttccttgtggtatacagataccagtgcagtttttattcttttagactctgacattgaattgcttattaagtatttgacgcgcaaagttacgaaatattgtttatcgtacgtaataataaggtgtgaattaataaaaaaaagcgttgactcttccggaggaaaagccaacgcttctttgcgcatacagtttatattcagaatttattaccagatagatactcgtttttcttttggtacaaacatggaatcttgttcggtgatattgaatgcttcgtaccagttggcaatatgaggtaatgcaccgtccacgcgccattttcctaatgagtgaggatcgagtttcgtcaaacggagaatttcttccggacgaatatttcccgcccacacatttgcataagcaaggaaaaagcgttgttccggtgtaaatccgtcaacaacttccaacggtgcggtttccattgctttcttgaaagcatgataagaaacttgcagtccaccatggtctgctatgttttctcccagcgttaggctaccgtttgcatgtactcctggagcgacctcaatactgtcaaagaagttcaccattacctgagcacgttcctcgaatttcttggcatcttcttccgtccaccagtctttcagatttccgtctttgtcatactgacgtccctggtcatcaaatccatgtgtcatttcatgaccgataacaactccgatagcaccgtaattcattgcatcatcagcattcatatcaaagaatggaggttgcaggatagctgccgggaagcagatttcattggttgtcgggttgtaataagcattaacggtctgaggagtcatcaaccattcatccttatctaccggtttgccggctttggaaatcatctcggcatacccccattcattggcacgttcgatatttgcccaataagaatcgtttttaatatccaaggctgagtaatctttccaggtatcgggataaccgatcttgacatggaaggtagccagcttctcctgtgcctttgctttggtcggttcgctcatccattcaagagcattgatgcgttcgcccaaagaagtctgtaagttcttcaccaacgttaccatacgttctttggcagcagccgggaagtatttctcgacatacatctgccctactacttcaccgagagcaccgtctaccgtacttacagcacgtttccaacgaggttgcatctcttttttgccggacattgtcttgccgtagaaatcaaaatcctgcgctacgaagtcatcactcaagtaagaagctgccgagttaatcagattccattgaagatatagcttttgctcatcgagggatactgtattaataacgtccgccacttctttcatagctgccggctgaccaacattcacttctttcagatcatttaagcctgatgtagtgaagtaaacatcccaggcaaatgtagggaagttctttttcagcgtctccatatccattttattgtaattagcatgagggtcgcgcaactctacctgcgaacgggctgacttggccaaacgagtttcgatattcatcaccgcttttacagctttttgtgcagcagcctcatcataaccagccaactgaaacatcttggcaatatgttcctgatatttatcacggatattccttgtttgctcgtcattctccagataataatcgcgttgtcccattccaatacctccctgataagtctgaaccagattcatcgaactgttcatatcatcagcaccgatatagaggctaaaataaggattaattcctttcttctgaatttcggcgatgtacgtataaatttcacctttatcttggagggcgtcgatcgcttccagttcagctttaattggagcaaccccttcctgattcagtttcacgctatccatggcgatattgtaaagatcacccactttctgagcggcactgcccggtgcgttgtctttctttgcagccagttcggcgattaatgttttcaactgctcacggctgttttcacgcaacatatcaaatgttccgaaacgtgaatactcgtcagtcagcggatgagctgcaacccaaccgccacaagcgtattgataaaaacttgtacccggcatagccatggtatccagattagcaaggtcgataccggatgttagcacggcctctttcttactgttacatcctgttgtcataaggcatacggcaagaattggtaaatacttagttactttcatattgcatacataataatttatcattttttcgcgtcttccagctccaacgagacacgttcccattcttctacgatagcatccaactgctgtttcaatttctgatgccgctcatagagttgcatatcagaggctccttcgggagttgccatttgtgcttcaacaatagatattgccgcttccgtctcttctatcgaagcctcacaatcagccacttggcgttcgagtttcttcagttttttattcaactccttctgtgcctcataagagagtttattctccgaaggttgtaccggctcttgctcacttcccttggcagaagccgtaggcgaagaagataaagatgttcctttctgaagttcattcaggttctctatctttttcttttgaaggaactcatagataccgctgagatgttcttttacatgcccgccaccaaactcatatactttagtcgcaagtccgtccagaaaatcacggtcgtgactgacaagtatcacagtaccgtcaaactcacggatcgcctctttcaacacatccttcgagcgcatatccaaatggttggtcggttcatcgagaatcaggaagtttacaggctcaagcaaaagcttaatcatcgccagacgggtacgttctccaccggaaagtactttcactttcttatccgaggcttcaccgccaaacatgaaggctcccaatatatcccgtattttcaaacgtatatcccccgttgccacacggtcaatcgtatcaaataccgtcagattttcgtccaacatttgtgcctgattctgggcaaaatatccgatttgcacattatgcccgattgtcaacttaccgtcgaagtcaatctcacccatgatacattttaccaaggtagacttaccttcaccgttcttgccgacaaaagcgaccttctctccccgattgatagtcagattgacgtcgtggaaaacgacatggtctccatacgctttgcgtacatcctcacaaatcaccggataattaccgctgcggctggcaggaggaaatttcaaacgtaatgccgaattatcttcctcatccacttcgatacggtcaatcttttccaattgcttgatacggctttgtacttgtactgccttcgttgctttataacggaagcgttcgataaagtcttccgtatcctgtatttgtttttgttgattttcgtaagcacggagttgttgttcgcgacgttctttgcggagaacgacaaactcatcatacttcaccttatagtcataaatctgcccgcaagtaatctcaatcgtacgggtagttacattattaagaaaggcacggtcgtgactgaccagtacaacggcattggcacgggtcgccagaaagttctccaaccactgaatactttcaatatcaagatgattggtcggctcatcgagcagaagtacgtccggacggcgaagcagcaacttcgcaagttcgatacgcatacgccaaccaccggaaaattccgaagtagggcgttcgaagtcctcacggctgaagcccaatcctagaagcgtccgttctatttccgcctgatagtttgtaccgcccatcatcaggaagcgatcattctcatgcgtaaaacggtctattaactggtgatattcttccgattcatagtctgtccgttctgccagttcccggttcatccgctccagtctcgcctgaagttcaaaaatatgttcgaatgccagttccgcctctcccatcaccgtccggttatcggcgagaatcatcacctgcggcaaatatccgatcgtgacatctttcggagtagccactactccatgtgtcggtgattgcaaacctgccaatattttcaacattgttgatttacctgcaccattcttgccgaccagtgcaatacggtcttttttatttataacatagctgacgtcttcaaaaagcggcgtcgcattaaattctactgataatccttctactgaaatcacttctgtctctgatttatacgattttgaactgcaaagataatgaatatttattggatacagagtagtatggcacgttatgaaaaacaaaaaaagcagccactcatcagaatgactgctttctattttaaccaatagtacttctttagaacaacttggcaggatattcaccggcatcaaccaatgcctgaatcttgtctactacactttgacggtcttccggataagtaacgccgaaccatttgctgacagtatccagcacttcaacagtagccgttccgtcattaatcaatttatctaccatcaatggaataaagaattcgctcttcaagttttccatgtttttcgggtcgctcaggaaagtcttgaagaattcctgactgtaagcgaagtaatcaggagtgaagccccagaagttcatacttaccggagtagtatcgggagttgcagtccattcgccgttatcatcgatatatttcacttcaccatccagacgttggatcttagtacgttccactactgaagtcagcagacctttatcatctgtactacaaataccacgagataccgtaccgctttcactcagcgtatttcctacgcggaaacctaccattgaataaacatttttagaatccgcaggaagtgcagaaaggaatttacccattacttggaaggaatcacgaccataaaagtcgtcacagttaattacagcgaacggttctttaatcacatcagcacccatcattactgcatggttggtaccccaaggttttgtacggtctgccggacaagtgaagccttcaggaagtgcatccaaagcttggaaaaccagttcacaaggaatgtgaccttcgtatttagaaataatcttatcacggaaatcctgttcaaagtctttgcggattacaaatacaagtttaccaaatccggcattgatagcatcatagatagaatagtccatgatcgtttcaccattaggacccagtccgtccaattgtttcaagcctccatagcggctgcccataccggctgccaataagaataaagttggtttcataaattgtgtaatattaaaaggttagtgatgtcaacggcatctgattttggtgcaaatgtacaaaaactttctttcttttgtcttatgtgatgtcctttcttttgtcttgagacaaagaaagaacgttagaacggatacccgatagcgaaatgtattcccagatttttgaagaaggcaccggtaacattataatatccgcttcgttccgtatcatagggcagatgcaaaggaataccgaagtcaagacggaacacaagaatatccatgtcgtaacggacgcctacgcctgtccccaaagctatttgtttcgggaaagttttcagacgaagttgcgaatcaggacgtgcctcgtccttgcgcagcagccagacgttacccgcatccaggaaagtagctccccaaatgctcttgaagatacggaaacgatattctacgttcgcttcgaaacggaacgtacctgtctggtcgagataagaatacttgctgtctttcgggtgatagccaccgggaccaatactacgcaccgtaaaagcacggatactgttggcaccaccaacgtagaattgttcactatatggggcaatcgtagcattaccgtatgcaaaaagagcgcctaacgctacacgggaagctattttattatttttgtctatgttccacaaatggcggaactcggtattaaatttcataaactgcgagaacggagcccccaaaagttttttcccttcctcattataaggtttgccgaaagcacgataaatagtggcagtcacatttccggcagaagtcacggtagattgccaccagataggattcttcactctccgcacagaggcattatcatatgtataagtgtactccatagccgggatgaactggttgtctaagctgacatatagtgccggattgtcggctgcaatctccataaactctttcgactggtgttgcaagacgttgaatgtcagtttgaaaggtgtgatactatgacgactggtacgcgtcggctggaaatcgtaggttgcgtttccgccgaaagataacagtttgtaatatcttgcccggttcaactgatcgatatacaaacggaaagtagtcgtagcgggaaagtcaaattcccttttcccccaacgcgggaaaaccactctagggaaagtcagagaagtagatattcccatttcccaactgttcatcaacgaacttttctctccgccaccggtctgccattcataagagcctttcagtttcacgttccaactttctccaccaccaaatacattattccttgtaactccgaacgaagcacccggaccggtctggtcgttacttttagttactacgttcaattccagttcagcgtccaacggtttggcaaaagtagcctgcatcgtgatgtccaacgtatcacaaacagctgttgtatctttgggggcatattggatatccatataactaaatattcccaactggctgagtttctcctgtatctgttcctgccgatactggctgtaaagccgggtacggttggaagcacgcatctgtgcgttccgtacaaactgttgataattcagccaacgataaagcatattgggacgaacctgcaatttattgtaatagtggatattcaagttcttatacatcatactgtcattcggcgcttctccgttctttccgaacagatagacagacgcatcacccacgtaataaggacgctgtgccgcagccggcaatcccggcacaggaatcaggcgaaggctgatatgccctccgggtaccaaagtcgtatccgcctggtaagtcatatagtcgggacggaaataaaaatatccgaggttacgcaacaatgtactgatacgggagcgttcttcgtccaaatcaaccacgttgaactgctcacccggacttatataagacatccagcgtccgcgctccataatccgcagagtctggggagtgaaccgttgatagtaaaccgtatcaatgaaataagggttcttcatatccaccgtatagataatgcccgccttcagactgtctttcttatcaacaaccgtttcataagctaccttcccattgaaatagccataatcacgaagcaaattagtagttaccttcacacgtacctccgggttgaccgtagaaataaatacgggaggattggccgcaaaacggttgaacatccatttaccgaatcccttcttatatttcacgaagtcattgtacatccacattttaaaagggataggaaggataccgccaaacatctttgtactaggtgtcttatcgagtgcagcatcaatttccgtcagcgccgtctctcctaccggtgttgtcgatttattcaatatgacagtcttgcttccggtgtaaagcacctccccttcgggaagatgtttcgtcaccgaacaagccgacagtaacactacacttatcagacaaacagccaatatatttatatgtatctctttcatacttacttctttttcttaaagatgaacagttcactaagtttgtccagcttcttgcgaagcacaataccgactccggtttccgtaatctcaccttcgagcacactctcgtagttcttgtcatagaacaggcggatataccgggttccggttctatccagacgatattccagagaaatattgtcgatgaaggattcggcgtcattcgtcgcattctcaccttgagaaaccttgccaccgattacaatctggaaacgattgttaaacaagcgttgtgaataacggaaactgtaatccgtacgtttacttcccgtctctgaatcgtcgtggtcttcgacaccgacagagagactcgcattcttcaagttacccatcaaggagtttatctgactactcaatacagaagtcagagcagatcccatattcagcttgccgagtccgccgccacccccaccaatcggtccggtgccgagataagttttcatcaccatgatatacaatgcctgtttacctcgttcttccgcccccatagcggtcaactcgttttgtacggtcgcatcttcgggagccgcaacatcgaatgcaaacgaaagattatccaagcggttcttgactacaacggaaacatcgaaattaaccatacgacttccaccattctctccttcggaaactgacgcacggatacggtcagtcgccttaaagttcaacatcgggtccatcggatttcccgtccattccacgtaactaccgttatcaatggcaaattcctttgctgcaatcaccggcaaagcatatttcatcaagccgccactcaacgtataacgtccggtcagagtcaggtcaccttgcggagtgtatttcatggaaaggtcacccccgccttccagttcgatacggttatcattacttgcatccaggtcaactttcactcggacggacggatcgatatgtaccatcattaccatgtccaatccgcctaaagagacagtcggcacttcctgccggacaacagttgtagtatcgctaaatgaagtaaatgttaccaaacttcccaaacggtcctgcactgtcaatggtgaatcggtcaagacatacgaaacatcggtgttccccagcagactcacgttcccacgcatattcagcccgtccaaaggccctttcaccgtcgcccggaaatcagcaaatactttgccgtaaaccagactttcacgggtacgcttagcatccagtaacgtataattttgtgccagcatattcaggttcgccattggacggctcatatcacgaaaatcaacatagccatcaatagtaaacggattcttcgatgttgtgtaaatagcaaatttatcaaattccaaccgattgttctttatttgcacaggacgattgtcaaacatgaaacgcgcaccatattgacgggaaaggacagcaacagtatccaatacaagttcgccgtttatcaaaggttgttcagtactgcccgttatattcagattaccatccatatcaccggacaaagtgaccatctggtcaggaataaacacattcgccacccgcagcggaaaatgctccaatgttgtattcacttccaaactatctttgcctgtgcgggtaggaaccagtttcccatctgccaccagcacttctgcctgatcgtgattcagataagcattcagatattgttttccctgttcgcccggcaaccacgtagcccctaatgcaacgtcaccgatacgctgacgttcataagtcagttcatcaacagacgcctcagccgagagttgcaaatccttttctgtctgtatgtaatgagcttccaacgagaacaatccggttatttcggggaagtaaggcaacacactcgttatctcttgcagacggattctacgtatttcaacatctatattctgcagagacaccgtatcgcccggtacggaatgtaccctgaatcccattccttcttcatcccacatatccacgttcgcgtatacacgcatatttttatgcaggtaaatccagttatgattctcgttgaaatgaaatctttggaaggcaacaatcggattctccggaatcagtgtgaaagcgattccgttccccttaccatgtccttcgaacagagggcgggcatttacccccagcaatacgcctgtttctcctttgccgtttttgtagtctaccagcaattccgcatcgcggtcgcgaatctctccggtcaaagtagtagcaaaagagaattgcggattcttcggtccgtttattacaccggcacgtagtttcattaaagtagtatcctgtttgacagtgaagaagattgtatccagttgcaatgtgtccatcttcaatgcatgcaccgcagcttttccattgattccccaatcgggagccgtaccgaacttcatggaaacatcatggtaggatatgtttttagtagccagaaaataagctaacggattctcttttcctgcggagaaagataaaatagctgtcggcaacgcttcacgcagttcggcgtggttcaaggctttttcatcaatctgcttcatcaggacatccatgaagtgtgtagactgacttatcaaaggattaacaccggaacgtgcactcaagttgagtttcatatcaccggatgttagatgtgtgaacaccctgttttgacgagcttcggcagaaagattaaaggcgagcgggcgcttcatcggttgaggcatcaaccccagttcgtgtaagtcgagctgagtgacgtcaaccgtcacttttccatctggataacgatgtgccagattgtattctgcatctgttgtcatcttcaacagcgcattgtcacttgtcagattagccgtcaccaatgcacctttcaaagctccagtcaaatgaacattggaaagctggtaacgtgcataatgtagttgatctaatgaaagattcagtttggctaaagcacgataagacatgacgtccagcccacggcctttggcatctgccgaaagagaaagttcgtagatagagtctttcggaaggaaattatggagttgtagattgtcaatcttcaagtcggctgcataagcctcggttgaggtattaagttctgcattcacccccatagagccttgcccctgtttcaagtgaagattagccttatattcaggtcctttcagctcgacacgggccttcagattcatgctatctgggattacgatagtaccgttgggggcttctcccgttaaagcagtcaggaagtttagattctgagtaatcatatccagaccgatagtccccgaacgcgtcaggctgtcagccaagttttcaagaataccgcctcctttcatggaaaaagctcccgggagatcgactgtgaaacgggaaatctgcatttgtttcagatttccgtccgtaccggcacgaaccacaagcggacggaagggatatgcctctttgaaactatccggcaaaccgccggcaaataacataacatcctctttgccgatataagcattgagaccggcggacaaacgtcctgtagtgggaatattgacaagttcccaatatgtctgggcggataaatctatttcggaatgaggggtttgcagttttatgccggaaatacgaataatcgagtcgttagaaaatgccctacccgtcaatgaagtgatactcaatccggaacgttcattcatcgaaaactcacggattacagcattcatatccctacctttatataataaggaatccaaaccgatacggatatcacgaacggcaatatgagacgcatcgaaaccttctccgggtttggctgctccagtatcataattggcagagcttccggataacaggaattgtttcagttcataaaactgattcttcagatcagcttgtgcatcattgataaatgcttctccgatatgagcagccattcgcatcgagtcagcaggaagttgcatactgaacgacacattcttcaacttcagtttatgaagatccactttccagtttacaggagcagaagctgttgtgtctttaggcgtagtcgtagtatcgttcatcaacatttgtacgtgagtgtccgataattccgtctggttgataacggccagctcattagaaagatcaactccatgactttgtaaaaagaaacgtcccagtaccccctttatcttcatgccttctattagattagccgaattgaacgctacctgacttaatgttacttcatctacctctacctttcccttgacgagcggccatgcctgtacacgcacgttcagactttccaaagacaacagcgtatccggttgctggatcacttccacgccacgaaccaacagattgagcggaaaacgaaggtcgattcgttccacctgaatctgcataccggttgctttggaagcgtatgctgtcacctcccgacgcaaaagattctgaacgggaggtatataaagtaatatcattagtattacaaaaagcaatacaggagtgagcaatatccaactcacccttcttatccattttcgtttcatgtaaaatgtgccagtgtattaaaaggtgacacaaagtaaacaattaattctgaaaaaaggttgacgttaggagcaaaatgttcaatcacaaaagaaatacaagtattatggttttctttcttcaccttctttaccggagctcttgtcactacttcaagccacttataccttacgagcttcttccagaaccttctgaatctccagaagtacacaagccgttttttcacctatctcctctgaaaaacattgcccacgttgtgtttccagccagttcaataaaggcacagcttccattgccccaattaaagtgaaaagcggaagtagtttgtgagccatagccgctattccgtccacctccttgcctgccaatgcttgttgcatccgatcggcattctttccggtttcttcgataaaggtctgaataatggaatgtgcggcatcagcatcgtcttcagaaaaggctgttaatgcagaaaagttcaaggaacttacagtctgcatatcctcagtaatgtgtgcttcgtcagcggcaagctgtccttcgttgactgtgagcaatagttctttcaccgtaaaaggtttgtgcaggcaaccggcaaaaccgtgttcttgtaaagcatctatatccatttcactgcgggcagttacggcaatcacaggaattgtctttgcctgcggaatattggaagcgcgcaagagttttaccaaatcaaagccattaatagcaggcatttgtatatcagtcagcaatacatcgaaaacagaggtgcggagctgttctatcaactcctccagttgctcacaacaaacggcgtcaattccatgttgctttaacatggctgccgtcaagcttaattgaattttatcatcatcaatcaacagtacacgtatcactttcatcgggggaagcgtgacagggtcttctgccgaaattgttttttcttccaatgccctttcggacacagattttcccaccggataaagagggagaatgactgtgaagcaacttccctcccccagcttactttgcacatcaatcgtaccttcaagcaaaacaaccaacttcttcacaatagacaatcccaagccgaagccttcttctccttgtgcaccggataaacgggtaaattcctgaaaaatccgttcgcggtcttccgtagccataccttttccggtatccgaaatcgctatcgtcagcttggaagaatcatatttagccgttaatgcaatctcgcctttcggagtaaacttcactgcgttggacaaaagattattcactatctgccggagtcgtaaagggtcgctgatgtatctcccatttaattcctgagcgacatggcattgcaaggttaatcctttggcggctgtcaatggttcgaagctaacatggatttcttcgaataactgcgaaggattgaaggtgacgcggttcacttccgctttattaaggtcgagccgatgaaagtcgagcaagtcgctgaccaatttcaaaagatgttccgaagaacttttcatattgtcaagatagaagcgctgccgttcgtcctccgtcagtcgggaaagtaattcggtatatcccataatagagcctaacggtgctttaaagtcgtgagtaatggcgagcatcagcttttcacgggcaataagcaggtcttccgcccgtttattagcttcttccaattgccggcggtaacgattgctgcgggatatgtcacgcactatcaaaatcaggaaaaagacagagagcagcactgctccgatagctattccaccaatggtgcgtgctgaacgcattcttacctcctgttgcatttctgcatcctggcgggcacgcaaggtcatttcctcctcgtattgttttatcaggctatccattcttgctgtcaactgcgaattcatacgctgatattttgtactagtccgccggattgtttttcgccgctgcaaccgtttttcctctgtagccatacgaatcttttgctgaagggaatctttagaagtggtcggttccagaatagtatccgtagcaacctccatggaggtattaacaagcacggcactgtcttgtttagttgggacaaacacttctgccaatctcttaaagaaacctttcttcttaggcgtagtcagtaaagaatcccgtttagtgataactcggtgttgtacccgttgctgagtaatgacagaatcttgttcggaaattatttcttcaatctccgaagcggaaagtaagctgtcattcgcttcgctcaatacccggagcatctgtatcgtattccggtctttctcgtgcagcagggtcaacaggctgtctgtccgcagattctcctggtcatcggcagccgacaatgtctccatttcgcgatgtacaaataccagagaaaaaagaagaattgcaagtaataacgtataaccgattgttactttcaactttgtggaacgataggaagccatacggtaaagttttaagtatcaagtattcacttggggagtggggagtttcgtcatgtaatgaaaacgccaccaaagcattaatcctgcacttgtcagaccgaaagggaacgccatccagacacctaccaccccccagcccattacgaagccgcagaaataacctacgggaagtgagatgataaagtaagcgataaaggcgatgagcatcatcagttttacatccgaaatgccacgcaaggcattagcaaaagtaatctgtaacccgtccccgaactgataaacgaggaaaggaaaaatgagagaagttaccatagccgccacctcaggactgtcggtaaaccaacctcctaaatagttacggcaaagaaagacaataaaagaaagcactacgcccaatgtcatcatcagatgaaaaccggcataggccgaacgacgaacgttcaaaatatcgttctgacctttgaagttgctgacacgaacagctacggcagctcccatgccataatacatcataaacgtaaactgtgaaatagccaacataacctgatgcgaagccagtgcaatggtccccaaccaacctatcattatggcactcagactaaaagaagctgtttccattcccatttgaaaagcaaccggccaaccaagtccgttcaaccgaccgaatatagcccgtgaccaccccaaacggaagaagccgactttgtaacggataaaacgagaactacgcaagaagataatgataaacacgagcaccatcataatacgtgaaaacaatgtgctgataccggctcccaacaatcccaactcgggcaaacctaactttccgtaaatcaaaagataatttcctatgatattcaatacatttcctcccaagagtatccacatggccgtcttggtatccgtgattccatccgtaaactgcttgaatccattgaaaagcataacaaacaccaatgaagccagcagcaccaaataataaggcttaatcaaaggaatcagttcttccggctggccgagattctctatattcagataaaggacagtcatacaaagcgtcaataataacgcgaccatcagattcgctaacaaactgttacgcaatgcctgtccggcaggtgcaaactgatgtgttccatatagacctcccacaacaggagttagcccgtatgaaaaaccggtactgaaaatgatagccaaattgaacacgttatttacaaaagaagctgctcccaattctaccgtactatgatgtccaatcatcagggtatcggcaaacccgagcacgatcactcctatttgtccgataacgataggtaaaccaagaaaaaataatgctttataatgctctctgtatgttctatatatatttctcatttacttttataatagagtacaactccgttctctttccgaaaagccgattgagcgacttcccgcaactgcatagcagtgacagagcgataacgttctacttctttctccaaatcttccgctttaccgagcaattcgaaccaggcaagattggtagccacattcaaataatttatattaccgaatatctgggtagactcaaacttatttttcaccttctccaattcctgtccgtcaaccaattcttgttgcaggcgatcgagttcgtcgcgcactgccgcttccgccagttcgaggctaactcccgccgaaggttttccggcaatgtgaaacaagcctgcatccacactacctgagatgtaagcatcaatgctcgagaatagctgtttttcctgtaccagatgttggttcaatcgactggaacgcccgttactcaatacatccgacagtatatcgaacacataataatccgggtgacgatgatcgcacatgtgataagccatgaacagagaatcaagaggtacatttctctctaccgtcagcctgcgttcttccgtctgttccggctcctgtggcagattccgtacaggaacttcccgacggggaacagatccgaaccatttctccgtcaattccactgcttcctcaaaagagatattcccggtcaccgccagtatcgcattgttaggagcataaaaacggaaaaagaatgctttcacctcttctaatgttgcattagcgacatgcgacaggtcttttccgatagtcggccattgataaggatgtttctgataagccaacgggcgcaaaagatgccccacatctccataaggctggttcagacagcgttgcttgaattcttccattactactcctcgctgtacttccagactccgttcgctaaaatcaaggctcaacatacggtcggactccaaccagaagccggtttccacattctgccggggcacagtgaggtagtaattggtgatatcattgttcgtccaggcattattctctccacccgctagctgaagcggcatatcataatcggggatatttaccgatccaccgaacatcaagtgttcaaacagatgtgcgaagccggtatgttcgggatgttcgtcacgagctcccacattatataatatatttagagccaccatctgtgtactttcgtcccgcgaatgtaccagccgcaacccgttgtcaagaatgtgcctattgattttcatatcatttagtcaagtatagtcgcttttattatcttcacatcttcttcgggacggtcgctacggtccgtcttcaccttctggattttatctacgacgtccataccctccactacttcgccgaatactgtatattcgccatccagatgtggagtaccacccacagtagtatatgcttctatctgctccggcgtaaaatggaattccggttcttttgccgacaattcctgtgcttccgcaaacaatttctcctgcaagtcataaagcccgttttcgtcattcgccttacgcatcttatagatttctttcatgtgtttctgcgccaagttattgaaaatgacattgatcttattttcattcatctggctttccatacccaacagtgtagaatcattgtaaaccttacccgttacgatatagaactgacaaccggaagattcttttttcggattcacattgtctccctgacgggctgcagacaacgctcctttcttatggaaatacttcggatatacaaattctgccggtacggtgtagccgacatcaccggcacccaacatcttccctttcggcgcattctttgaatccgggtcaccagcttgaatcataaaatctttgatgacacgatgaaataatgttccttcatatactccgtctttcaccagtttgataaaattatcacgatgcttgggtgtctcattatacaacttcactttgatatctccggctgttgtttcaatctttaccaatgtctctttatccatgtctcctcctttttttgttccggttttgcaggcagtaagtccgcaaaacgatatagttaataatatcaatgtaatctttttcataacgcttttatttaatttaagtttgcaaatataccactttcgcctaaatcatcttacctttgtgacttaaaagaatcaaaacctgacacaatgaaagccatattaatagtcgaagatgatataacttttggaatgatgctcaaaacctggttaggcaaaaaaggatttgaagtatcatcagtgagtaatatagcacgtgcccgaaagcatatcgaaagccagactgttgacttggtattatccgatttacgattacccgattacgaaggcattgatttgctgaaatggatgaatgaccagggactggatattcccctgattattatgaccggttatgcggatattcaatcagcggtactggccatgaaacttggtgcacgggattatatcgcaaaacctgtcaacccggaagaattattaaagaaaatatcagaagctctacaaacagagagaacgccaacagctcattccgcagccaagatgtcttcgaaaaaagtctctcccgcctcatccaaagagacaacagaaactcgtcgtgcctatctggaaggagaaagtgatgctgccaagcaactctacaattatgtaggcctagtagctcctactaatatgtccgtactcatcaacggttctagcggaacaggtaaagaatatgtggcacaccgtattcatcaacttagcaagcgtagcgacaaaccgttcattgccgtagactgcggttcgatacctaaggaattggcagcctccgaattctttggtcatgtaaaaggctcatttacgggagcattgacggataaaacgggagctttcgttgcagccaacggtggcactatctttctggatgaaatcggaaatctcagctacgaggtgcagatacaactactccgcgccctgcaagagagaaaaatacgtccggtcggttctacacaagaaatatccgtggatatccgcctggtatcggccaccaacgaaaatctggaacaaggaatcgaaaagggaacatttcgcgaagacctttatcatcgcatcaatgaatttaccctgcgaatgcctgacttgaaagaacggaaagaagatatcctgctattcgccaacttcttccttgatcaggcaaacaaggaattggacaagcatctgattggtttcgacgcaaaagcgtcacaagctttattgagttatcattggccgggaaacctgcgtcaaatgaagaatatcgtgaaaagggcaaccttactggcgcaaggcagttttattacattgctcgaattaggtactgacttactggatactactacaacttgtaccacaagcatgtcattacgcaatgaggagacggaaaaagaacatatattggaagcattacgccaaaccgggaataataaaagtaaggcagcacaactgttgaatattgaccggaagacgttatataataaactgaagctatacaacattgatttatagcattcaagtcagccccagacaacacacaaaacaacgattgaatgaaacacatacgtaaattgaaagaaatgacatattgcaaaagcacacatttgtgtacttttgcaatataaaagccttacgaatattatcgcgccattgcataaacattaacaccatacaaatcaatattatgaagaagtttaattttatatgcctttctatcctctattcaatttgtagttttgcgcaacagcagagtattcctgtccccaagcctcatcaactgaaatggcatgaagccgaaatgggagcagtctttcattacgacttgcatgtattcgatggtatccgctacggacaaggcaataaccgcatcaaccccattgaagattataacatttttaatccaaccgaactcaatactgatcaatgggtacaagcagccaaagctgccggatgcaaatttgccgtactcacagccacccacgaaaccggattcggactttggcaaagtgatgtcaatccgtattgcctgaaagctgtcaagtggaaagacggcaaaggagatatagtccgcgattttgtaaattcctgccgtaaatacggccttcaaccgggcatttatataggtatccgttggaattctctgttgggtatccataacttcaaagctgaaggcgaaggagaatttgcccgtaaccgccaggcgtggtataaacgcttgtgcgagaacatggtaacagagctatgtacacgttatggtgatctctatatgatatggtttgacggcggagctgatgatccacgcggtgacggtcctaacgtagaacctattgtgaataaatatcagcccgactgtcttttttatcacaacgttgaccgcgcagactttcgttggggtggttcggaagcaggtacagtagagtacccttgttggtctaccttcccctacccatacagccacagtaatgctaccgaacccgcacgtaaccacaacatactattaaaacacggcgataaagacggcaaatattgggtaccggctatggcagatactccattacgtggagcaaacgggcgtcacgaatggttttgggaaccggatgatgaaaataacatctacccattggatgcactaatggacaaatacgagaaatcagtaggaagaaatgcaactctcatcctcggattaacgcctgatccgaccggattgattcccataggagatacgcaacgactgaaagaaatgggagatgaaataaaccgtcgtttttcttcccccatagcgaaaactttagggcaaaaaaagagcctgactttgaatctcgggaagaagcaaactgtaaattactgcattattcaggaaaatataaaaaacggagaacgtatccgtcaatataagatagaagcaaaagttaatgggaaatggcagtctgtctgttccggagaatccgtagggcataaacgtattgagaagtttgatccgatagaagcaagcgcattaagactaaccattcccgagtctgttgcattgcctgacattatcaattttagcacatactacattaaataaaaagtacaagaagaaatctgcaaataacacctaataactaccccatgaataaaaagaaactattcccactcgcacttgtgccactcgcagccaccagcctgcaagcacaaagcaacattcagacagggcgtacagacaaacgcccgaatatcatcctctttatggtagatgatatgggttggcaggatacttcccttcctttctggacacaaaaaacgcattacaacgaactatacgaaacgccgaacatggaacgactggcccgtcagggaatgatgttcactcaagcgtatgccagtagcatcagttctcccacccgatgcagcctcatcaccggaacgaatgcggcacgccacagggtaaccaactggacgctacaaaaaaacaccatgacagaccgcaaagacaaacagcttgccgtccctgattggaattataacggagtaagtcaggtacccggtactaacaacacctttgtaggaacttcttttgtacaaatcctaaaagacaacggctatcatactatccattgcggaaaagcccatttcggttccatcgacactccgggagaagacccgcaccattggggatttgaggtaaacatcgccggacacgctgccggaggacttgccagttacctcggggaagagaattacggacataccaaagacggaaaaccagtttcactaatggctgtccccggacttgaaaaatactggggtacggaaacatttgttaccgaagcattaacgcaggaagctatcaaggcactaaacaaagccaaaaaatacaatcagcctttttatctgtatatggctcaatatgctatccatgttcctctgaataaagatatgcgcttctacgataaatacaagaagaaaggtatgaccgaccatgaagctgcttatgctacccttatcgaaggaatggataaaagccttggcgacctcatgaactggctggagaaaaatgatgaagcagacaatacaattattatttttatgagtgacaacggaggacttgcagccgaatcctactggcgtgacggaaagttacatacacagaatcatcctttgaatagcggcaaaggttctacctacgaaggaggtattcgtgaaccgatgattgtcagttggccgggagtggtgaagccgggtagcaaatgtgacaattacttattgatagaagacttctaccctagcattctcgaaatggcaggaatcaagaagtataaaacagtccagccgatagacgggatcagttttattcccctattgaagcaaacgggaaatccttctaaaggacgcagtcttttctggaatatgcccaataactgggggaatgacggtcccggaatcaattttaactgtgcagttcgcaatggcgactggaagttgatttattattacggaaccggtaagaaagagttattcaatatccctaatgatataggtgaaagcaacgacttaagtgcacagcatcctgacatcgtgaaaaggctttctaaagaattgggaaactatctgcgaaaagtagatgcacagcgaccaactttcaaggctatcggacaaccttgtccctggccggatgaaaagaaatagtcgttgaaaagaaaaagaactgtggcggggagtgtggaattattccacactccccgccacagtttccacacacaccacacacaattccccactagttcagcttgtcttattattcgcaaccatttatttttcaaccacttatcacatcctttgcatttctggcacacgctttgaactttaattagacgttaatgcaaaagcaacaaccgattccttaacacaaaagagaattgaaaacatatgtctaataatcattaaagcaaacgattatgaaaaaattagtattagtagtagcaatgtttatgtttgtttgtggtggttcattccttgtaaaggctcagaactctgaaaaagctgcgacagcccagtcagaagttaatgccgcacttatcgttaatgatacagtagtcaaagacactgtaactaaaaaagacgaacctgtgaaaacagaactgagtgcaccaaccgcttttgtcaatgatacagtagtcaaagacactgcatccaaagacaaaccggctgagcctgtcaaggaataaccttaccaaaaactctcagaacaaagtctgctgaataatagtaagcacactacaaaaaagtcacccctacttcgtctattccgggggtgactttttttgtacctacatacttacttgtttggataaaatattgtacttttggaagtcaataaattatccacccaaactaactgaataaacatgaagctaagaagccttttactcattgccctcgttgcggtcgtattttgtggttgccacagttatcaaccgacctctatcaccgttgcctcctataatctcagaaacgccaacggctccgattctgccaaaggaaacggttggggacaacgctatccggtcattgccaaaatggtgcaataccacgatttcgatattttcggaacgcaggagtgtttcattcaccagctgaaggacatgaaagaagcattacccggttatgactatataggtgtaggccgcgatgatggcaaagagaagggggaacactccgctatcttctaccgcaccgacaaatttgatgtgatagagaaaggcgatttctggttgtcagagactccggacgtgccgagtaaaggctgggatgcagtcctgccccgcatttgcagttggggacacttcaaatgcaaagatacgggctttgaatttctattcttcaacctgcacatggaccatatcggcaagaaggcccgcgtggaaagtgcttatctcgtgcaagacaagatgaaggaactcggtaagggtaaagagcttccggctatcctgaccggcgacttcaacgttgaccagactcatcagtcttatgacgcttttgtcagcaaaggtgtgctttgcgactcttatgagaagtgtgacttccgctatgcaaccaacggaacattcaatgatttcgatccggacagtttcacggaaagccgcatcgaccatgtattcgtctctcctgttttcaaagtaaaaagatatggtgtgctgacagacacgtatcgcagtatcagaggaaacggaggcaagaaggacgcaacggactgtccggaagaaatcgacatcaaagcttatcaagcccgcacgccctcagaccatttccctgtaaaagtagaactggtgtttgagggagaagaacaaaaataactcggaaagctttacctgtactaggtctacccgacaaaacacactgttgggagagttaattctgagacttatcaatgaaggaaaggttgacttattgaacagcatccaatcgtttccactcccgctcttacccatgaaataactgtttcatacggcaaaaccaatagtttcatgcattggaacctttggtttcgccgtacagaaaccatagtttcaccggtgggaaactttagtttcagacgcttgaaacttttgttcccaaggcttgaaacttccagtttcatacagcgaaactactcttttctctatgaacagtgaaagcaacagttaccgtcacactattgtcacgccttgctatcacagcagaactcacatattatcaactatttatatcttaccatgtgacagatgacagtatttttttttattcatttgtagagagataaatccgatgttggcatcagacaccgaacgctccgccccgactatacagcctccaccgagaggatacatttccaacgcaaaaaaaggatttgtactgattaaaacagttcaaatcctttccataaatttccctcgggaaggggagctttcagttctatcagctccttcgagacagggtgtacgaaccgtaccctcctggcgtgcagacaaatgcttccatccggattggaacgcggagaaccgtatttcaaatctcctttgataggacatcccatttttgccagttggcaacgaatctgatgatgccgtccggtttttaagtcaacttcgagtaaataatagttgtccgaacgaccgatcaaacggtagtccaaaaccgctttcttactattcggcacttccttgtcgtatgcatagctcttgttctgcttttcattgcgcacaagaaaatgcaccaattcgccttctgattctttcggagcattcttcacaactgcccaataagtctttttcacctcaccggcgcggaacatctcattgagccgcgtaagcgccttactcgttttggcaaaaataacaagaccgcttacagggcggtccagccggtgtgtcacaccgaggaaaacattgccgggtttctgatatttctctttcaggtactgcttcacagtctccgaaagaggcgtatcacccgtcttgtctgcctggacaatctcggaagcggtcttgttgactacaatgatatggttgtcttcgtatacaacagtcattctgttcgattacatgttcataccaccatctacctgaatcacctgtcctgatacgtaagaagacatatcggaagccaggaaggtagcgatgtttgccacatcttcaggagtaccaccacgacgcaaaggaattttctttgcccattctgctcttacttcgtcagaaagagcggcagtcatgtctgtcaggatgaatcccggagcgatagcattggcacggatgccacgagaaccgagttcttgtgcgatagacttggccaatgcaatcatacctgccttggaagcagcatagttagcctgtcctgcattaccgtgaacacctacgacagatgccatgttgataatgctaccggctttctgacgcatcatgacaggtgtacaagcgtggatgaagttaaatgcagatttcaggttcacgttgattaccatatcccactgctgttcgctcatacgcatcatcaaaccgtcgcgagtgataccggcattgtttaccaatatatcgatacgtccgaagtctttgtggatttcttctacgacctttgcagtatcttcaaagttagctgcgttagaagcataacctttggcttttacacccattgcttcaagttcttttgctgtattttctgcattttcgtcaatgacaaggtcagtaaatgcgatgtttgcaccttcggcagcaaacttcagagcgatagccttaccaataccgcgggcagcaccggttacaatggctgtttttccgtctaataatcccatactaaaagttatttaattaaatttctgttctatgcagtgcgccaaacacaatgttggctacgtacttatttctcgtatcttcatccagatgtgcacctatatgaccacggatgtaaggaacttcaatccctttcacacaataatgaatcaagtcagccgtcatctccacatcgtcaatgtgaaaaactccctttgcctgtccttccaaaagaacggtcttaaagagttgtacctccttcgcatcaaatttcttacggactttctccacccgccagatatcacggaagaaataagcacgtaaggttccgtttcgatagactacttcttttactgcatccaaccgggtatatatcatctccaacagtttttcgtccggcgagatattcttctcagctacccgcttcatcatatccgacaggatatctaattccgattctacaacagccagatagatttcatccttacttttaaaataggtataaagcgttcgtctaccttttttagaagcaagagcgatatcattcatcgtagtgttctctacccccatctttgcgaaaagctgacgggcaacatctactaacttggcttttgttttggatacggtcataggttacaaattgcacattgctgaatattttgagcaaaagtaactcttttctttagaccatacaagaaaacagacagaatattaacatttgtatattaataggtactaaaaaaactatcatcattatcctgctcattttcagtaaaataagaaagaaatgatgatttattcgaaaaatattcagcaatttatttgtttgtctcaaaaaaagccgtacctttgcacccgttaaacatcgcggagtggagcagttggtagctcgttgggctcataacccaaaggtcattcgttcgagtcggatctccgcaactagaaaaagaagaatcgtagaaatgcgattcttcttttttatgtaggcactttcaatagtagttcaattcacaagttcctttcagttaccaacaagaatatcaacaaagttattaacaggttaattatctaaaaataagctaattgctcctaaacgaggaccgtttataaacaaggctagattcacttattcacaactatatatttcgttgatatattataaattcactcttctctcccaaacgaacgatactccaacggagtaagccctgtacgcttcttaaaaaaaaagaagtattcggtagactggaaaccaagaaaaaaagaatctccttgacggattgggaagtaccgaccagtagttgtttggctttacgaagtttcagttcttgaaagtatttggcgggagcatatcctgtatattctttgaaaacacggcggaaccatgaatagctaatattcaacctcatcgccaattcctccggatccacattgccggctacattttcattcattataatcttggcctgttcaatcttctgatcgacatcactcatttcaaaaatcttgttttttggagacagaatgttctttcaacggatagggagagtcgggaggaatagactgataaccgaccgtattaacccacaaaccgaatttccggtccatgtcatttacaatcaagtatttaaattccactcctaagccattgtcctcagccatatcaatgtgttttcatacaatttgggttggacaaaaataagaattatcttcagaaatcgtatgctaagaaacaaaaaacacccggagtgtctttttggatacatccggatgtttctcacaaacaaatcttatttaaacattaaaatgctttgcgatataatacttcaatatcttcaactgatgtaggacgagggttaccacccgtacaaacatcattaaaggcagctaccgccaatgcagggatatcttcttctttcacattgatctcatgcaatttttgcgggataccgatactgagagaaagagattttaccgcttcaatagccgcttttacaccttccgcctcactcataccggcagtttcaactcccatagctttcgctatattgatatatttcggagcagccggagattcagcattatattccattacataaggcaacaatagagcatttgccaccccatgaggagtatcatagaaagcacccaacgggtgagccattgagtgaacgattcccaaacctacatttgagaatcccataccagcaatatattgtgcttgagacatcgcttcacgggcaactacatctttgccattatccacagccgctttcagattctgcgcaatcatttcaatggctttcagttcaaacatatcgctcatcgcccaagctcccggagtgatgtaactttcgatagcatgcgtcaaagcgtccatacccgtagcagcagtcagccctttcggcatagaatacatcaattccgggtccacaatagccactgccggaatgtcattcgggtctacgcaaaccattttcttacgggcatcttcgtcgataatcacgtaattgatagtcacttcggcagcagttcctgcggtagtaggcaatgcgaaggtcggcacagccttatgtttggtatcggccaccccttccaaagatttcacatctgcgaaatccggattgttcactacaataccaataccttttgccgtatcaatagaagaaccaccacccaatgccacgataaaatcagcaccggaagctttatatgcagccacaccattctgtacattggcaatagtaggattggcttttacatcactgtaaagttcataaggaatcttattgtcgtcgaatactttgatgatttcggcagctacaccgaacttgataaggtctttatctgtaacaaaaaaggctttcttaaagccacgtctagctgcttccacagcaattacactccggcaacctgcgccgaaataagaagtctcatttaaaataatgcgattcatggttgtgttattttgtttaaagggttaaccgcaacatctcctattgtaggaaatattgcggttgctaaagtagataaattcaatgattaatacaaatattatttaggaagattgaaggcaacagtcatttccttcatctgttcccggctcatgccatccggttcgaagcccatattcttggctgcaatataaattaatgcggatttatttaatacgtcaatttggtcgaaagcctgcatcgcatcgcagtcaacagcaaatactccatgcttttcccacatcaccacatcatagtcctgcaattccttaatcgtagcttctgccagttctaccgaactaggcaacttataaggaatgattcccaaacctctcgggcagaatgcctttgtctccggaatcatactccacaacaaattggtagccacatccttttgaaggaatttttcacaatgcgtcattgcaatcaattcgatagggtgagtatgtacggaagccttataaggagaattcttactcaacaagtcattatgcacgctcaaatgagaaggcagctctgatgtcgggacaaccgcctcatcagctataataacataactggcacaatcatccaaaatccggattaccgaaccattctccatcggccagcgagctaaatcacgcatacgtttgttggttcctttacagtaaaaataacagcctttgagataaggcagtgtgacaccgattgacctgacttcactaatcggctgcatccgacgaatttcatcgtctacaaattctgtgatattaatggtgatattaccgccattacgttcagcccatcctttctgccacaagtatccggcaacttctgctaccttgtctacttccttggcaagtgctgagcgattttctaaaattgatttcatatatatctattatttaaaacaaattcgggaataccagcgagaaaatcaacaccagcagtccacaaaccagcacagtgattgttttcgcagatactcccttccattctttcaggataatcccccagacattactgaaggtcacattcaatgccattaggatacaccaggaaaaagccagtaatacggggctttcggcaagaaagctctttcccatttccagtccgaagaactgcatataccacagcacaccggccaacgcacagaatactaaattgttactccacactttccctttagcatagtcattcatggatttattagtcacattctgttgcaaacaataaattgcatttgtcaggaaccctccgaatgtaaccagaaagataacaggaagccctgcataaagtccttcaactcctcccgctaatgcagcctccttgataggcgtcccggcatccagtcccaaagcgaaacaggcactcatcacacctgccagcaacgctaccaacaatcccttcgtcaaagcaaagtctttcacagcagcgcgcttttcttcttcactcatattctgcgcacgcaaactaccagcatagccaataatcgcaataccggctaacgtaatacaaacacctagcagaagaaccagtccgttaccttcgaacaaatttgttcccgcaaaaagagccggaaggagcgttccgaaaccggcacaagttcccaacgagatgctctgtcccaatgcaacacccagataacgcatggaaagcccgaaagtcaatcctcctactccccacaatatgccatacaagatgctcattccggcacctccagctccccacagttcaaacaaactgcctccttcggacacccccagcaatgatcccaggaacggaaacactaaccaggcaaatacaccttgtatcaaccaaaaactttcccaactccactcttttacctttttaataggtacataagaactagactggcaaaagctaccaatggctataatcagcaagccgatcagaatatccataacttatcgtttagaagttacttcagcttcgtacttttcgatctccgcaatgaaatcttcgcctaccggaacattatttttcaagcagaacatatcccataccgcattccaaggaagcgctttttcttcttcaagcaaagccaaacgctgaaatccttgtccgttagcttcgtattcacgcaatttggcaatcggttcaagcaaagcacgagtcatacatttctgtgcagcacggctaccgattacataagcaccgatacgattgatagatgcatcgaaataatcaaggccatagtgtacacgatctagtgcaccacaacgaacgatttcactgaacagttccatagtaggatcatccatgatagtgacgtggtcggaatcccaacgtaccggacggcttacgtgcagcatcagttcaggaacataaagtaacaatgaagatactttgtcagccacactttctgtcggatgaaagtgacctgtatccaatgtaatcatcttattgtgtgaagcaccatagccgatgtagaagtcattagaacctaccgtataactttccaaaccgataccaaacaccttagattcgatacagtctttcatattcttatatccagtagcgaaaatctggtccagagaatctttcaacagtgcacggtatttcatacgattgactgtaatatccttgcttccgtcgtgtacccaaagattcatgatgcaaggatcaccttgcgctttacccatttcttcggccactgcacgacaacgtttcgtatgttcaatccagaactggcggataccttcatccgggttagaaagcgacaaatcaccggatttcggatgtgagaaagaagtagaattaaagtccagtttcatattatgttctttcccccactctatccagcttttgaaatgttcgggttccacctgatcgcggtctaccaccttcctctgaaaatctccgtaaatctcatgcaggttcagccgatgagtacccgggatataagaagcggctttcaagatatcggcacgcagttcgtcaatattgcgggctttacccggatagttaccggtagcctggataccaccagtcaacgaaccggcctgtacttcaaatcctgctacgtcgtcagcctgccaacaatgaagtgacagatgaaaatcctgcatggttttcaatacttgttcggtgtctacccctaccgctgcataacgttccacagcaatctcatacgctttctgaatcagttcttcttttttcatgatattctattgtttaaaatgatattccaccggttatttattaattatcgaatgcagtttttaaagtggatataagccgtatcccaagcatccgtatcttgtggatgataagtttttaaaggaacagaccgctggattagccgacgcatacctgccatatccgttgcttcccccgccgccattgcctgaatcatcacattaccgatagcagtggcttcggacggtcccgcaactaccggaataccgatagcattggcagtaaactggttcagtaaatcgttacggctgccaccgccaatcacatgcaatgtttcaatcggacgaggagaaagagaacgcaagttctccaacacctgacgataacgcaaggccagactctcaaagatacaacgcactacttgtccacgttgttcgggaacaggctgtccggtggcatggcaataggcagcaatcgatttttccatattcgcagggtttacaaagcaatcatcatccggattaatcaggctgcggaacggttcgcaagcatctgcctcgctgattaactcaggataacttgtatctccccaattcaaacggcaacgttccaatagccacattccgcaaatattcttcagcagacgaattgttccttccacaccaccttcattcgtaaaattcaaggtttctgtttcggtattaatcaccggagcgtccgtttcaactcccatcaacgaccaagtaccgctactcaaataagcaaaattacggtctaacgctggaacagcggcaacagcagcccccgtatcatgtccggccacagcaatcacaggcacagctcccaatccggttattttctgcacttcttctgtcaatactcctaccttttcacccgggaatacaaaacgaccgaagttcttctctgtcaatccaaccactttcagtaactccggttcgagacttcgagtttgtgcattcaccaattgagcagtcgaagcaatcgtatattccgtcaccattttcccggtcagcatataacttaatgcatccggcataaacaatatcttatccgctgcctccaatgcgctatcattattacggcgtaaagtatctaactgaaaaagtgaattaaaattcattatctgaatacccgtcttttcatataccttgctacgggagatgcgggaaaagagagcgtccggagctcctaccgtatgagggtcacgatatgcataaggctgacgaagtaagtttccgtcttttccgacacaaacaaaatccactccccacgtatcaataccgatagaagcaatagactcgccacggtgagccaccaattttaatccttcaatgacatgacgatataatgcataaatatcccaatagaaatgcccgcccacttcaatcaagtgattaggaaaacgattgatttcttccagattcaatccaccttcaataaaagtacccaagatagtacggccgctcgttgcgcccaagtcgactgcaaaaaagttttgtttcatggtattctgtctatatatttaaagtatccatttacctacatggcaaagatagacgattccttcctcatgctccttacacattttgattgaaaggatatacattttgacacaaatacataaaccaaacttccactgtttagcatatttttcacttttatgcaaaaaaagtattgttttatgcatattttctccagaataatgcatacttttgcgccattcttagaataattatacaatgaagaagaaagcaaatcggttagacgccatcaaaatgattatctcaagcaaagaggtcggttcgcaggaagaactgctgcaagagttgaaccgcgaaggcttcgaactgacacaggccaccctctcccgcgacttgaaacaactgaaagtagccaaagctgccagtatgaacgggaagtacgtatacgtgctgccgaacaacattatgtataaacgctccaccgatcagagtgccggcgaaatgttgcgaagtaacggattcatttccttgcaattttcaggcaacatcgccgttatccgcacccgcccgggttacgccagcagtatggcttacgatatcgacaacaatgaattcagcgaaatactgggaaccattgccggcgatgatactatcatgttggtgttgcgtgaaggagttgcgacaagcaagattcgccagcttttgtcactcatcattccgaacattgaataactatacatatttatatatataaagaaatggacactcaacaaatagatgttatggtagccgacgcctcacatgaggtatacgttgacactattttggaaactatcagaaatgctgccgccgtgcgaggaacgggaatcgcagaacgcacacacgaatacgtagcgacaaagatgaaagaaggtaaagcaatcattgctctctgtggtgacacattcgccggattcacctatatcgaatcatggggaaacaagcaatacgtggctacctccggtctgatcgtacatcccgatttccgtggtttggggctggcaaaacgcatcaaacaggcttctttccaactggcacgcctccgttggccgaaagctaagattttcagcttgacctccggagcagctgttatgaaaatgaacaccgaactgggatacgtccctgtcaccttcaacgaactgacagacgatgaatctttctggaaaggatgcgaaggatgtatcaaccatgacatcctgaaagctaaaaaccgtaagttctgcatctgcacagctatgctgtacgacccgacagatccacggaacattaaaaaagaacaagaaagaaataacatttaaaagatacagcactatggaagaaaagaagaaaaaagtagtggtggcattcagcggcggactggacacatcgttcaccgtcatgtacctcgccaaagaaaaaggttatgaagtatatgcagcttgtgccaatacgggtggtttcagcgaagaacaactgaaaacaaacgaagaaaatgcctataaactgggagcggtaaaatacgtaacgctggacgttactcaggaatactacgaaaagagtctgaaatacatggttttcggaaatgtgctgcgtaacggtacttatcctatttcggtcagctccgaacgtatcttccaggcattggctatcgcacgttatgccaacgaaatcggtgcggatgccattgcccacggttctaccggagcaggtaatgaccagattcgtttcgacatgactttcctcgtactggcgccgaacgtagaaatcatcacactgacccgtgatatggcattgagtcgtcaggaagaaattgactacttgaacaaacatggtttcaatgcggacttcaccaaactgaaatattcatataacgtaggtctgtggggtacctctatttgtggtggtgaaatcctcgactccgcacaagggctgcccgaaacagcttacctgaaacacgtagaaaaggaaggcagcgaacaactccgcctgactttcgaaaaaggagaactgaaagctgtcaacgatgagaaattcgatgacccgatcaaagcgatccagaaggtagaagaaatcggcgccgcttacggtatcggccgtgacatgcatgtgggcgacacaattatcggtatcaaaggccgcgtaggtttcgaagccgccgccccgatgctgattatcggtgctcaccgtttccttgagaaatacacattgagcaaatggcagcagtactggaaagaccaggtagccaactggtacggtatgttcctccacgaaagccaatatctggaaccggttatgcgtgatatcgaagcgatgttgcaggaaagccagcgcaacgtaaacggtacagcgattctcgaactccgcccgctttctttctctaccgtaggtgtagaatcggaagacgacctcgtgaaaacgaaattcggagaatatggtgaaatgcaaaaaggttggactgctgaggatgcaaaaggctttatcaaggtaacttccactccgttacgtgtttactataacaaccataaagacgaagagatatgattaaagcaggaatcattggtggcgcaggatatacggcaggcgaactaatccgcctgttactcaaccatccggaaactgaaatcgtatttatcaacagcagcagtaatgccggaaacagaattactgacgtacacgaaggcttgtatggagaaacagatctaagattcaccgaccagttacctctggacgaaattgatgttcttttcttctgcacagctcacggtgacacgaagaaattcatggaaagccataacataccggaagacctgaaaatcattgacctttccatggactaccgtatcaagagtgacgaccatgactttatctacggtctgccggaactgaaccgacgagctacctgtacggcaaagcacgtggccaatcccggttgtttcgccacctgtatccaactcggcctgctcccgctagccaaaaacctgatgttgacagacgatatttcggtaaacgccattaccggaagtacgggtgccggtgtgaaaccgggagctaccagtcatttcagttggagaaacaataacatcagtgtgtacaaggcattcgagcatcaacacgttccggaaatcaagcagtcactgcaacaattacagaacagctttgactccgacattgactttatcccgtatcgtggcgatttccctcgcggcattttcgctacccttgtggtaaagaccaaagtagccctcgaagaaatcgtccgtatgtacgaagaatattacgccaaagactcatttgtacatattgtagataagaatatagacctcaaacaggtagtcaacaccaacaaatgcctgatacatcttgagaaacatggcgacaagctattgattatctcctgtatcgacaacttgctgaaaggtgccagtggacaagcggttcataacatgaacctgatgtttaacctggaagaaaccgtaggactacgtttgaagccttcagctttttaaaaacaaaagaattatgaaattattcgacgtatacccattatacaacatcaacatagtcaaagggaaaggctgtaaagtctgggatgaaaacggaaccgaatacttagacctttacggaggtcatgccgtaatctctatcggacacgcacatcctcactatgtggagatgattagcaatcaggtagctaacctcggtttctattcaaactcagtaatcaacaaactccagcaacaggtggccgaacgactgggaaagatttccggttacgaggattacagcctgttcctgataaacagcggagccgaggcgaatgagaacgctctgaaactggcttctttccacaacggacgtaccaaagtggtatctttcagcaaagccttccacggacgtacttcactggcagtagaagcgaccaacaatccgtctatcattgcacctatcaacaacaacggtcatgttgtttatcttcctctgaacgacgtcgaagccatgaagcaggaactgtctcggggagatatatgtgccgttatcattgaaggaatacaaggtgtaggagggatcaagataccgactaccgaatttatgcaggaactccgcaaagcttgcacagaaaccggcactatcctgattctggacgaaattcagagcggatacggacgtagcggtaaattcttcgcccaccagtatgctgatatcaagccggacatcatcaccgtagccaaaggaatcggtaacggcttcccaatggcaggcgtattgattagcccgatgtttaaaccggtatacggacaattaggaacgacttttggaggaaaccacctggcatgttcggcagcccttgccgttatggacgtgattgaacaggaaaatctggtagagaatgcagccaaggtaggtaactacttgctggaagaactgaagaaattcccgcaaatcaaggaagtacgcggacgcggactcatgataggactcgaatttgaagaaccgatcaaagaattgcgcagccgcctcatctatgacgaacatgtgtttaccggagcaagcggtacgaatgtactccgcctgttaccccctctctgtctcagcatggaggaagccgacgaattccttgcccggttcaagaaagtactctaattgctcattctgattaataaacagccaacaataaaagcagcctttacaagaaaacgatttcttattcaggctgctttttgttttttcgtaattaaccgttacctttgcctgtgacaactcattaaaaacaagcgtatatgaaaatagccattatcggtgcaggaaatatgggcggttcaatcgcccgtggcctggcaaaaggaagtctgatagcagattcggacatcatcgtatccaatcccagtgccgggaaactagagagactgaaaaaggaatttccgagtatctctaccacaaacaataacgcagaagccgccacaggagcagacattgtcattctagccgtcaaaccgtggctgatgcaaccggtcatgcgcgagttgaaactaaaaagcaaacagatacttatctcggtagccgccggtatcagctttgaagaactggctcattacgtcatcgcaccggaaatggcaatgttccgtctgattccgaacacggccatcagcgaactggaaagcatgacactggtcgccgcacgtaatacgaatgacgaacaggaccaatttatcctccgcctattcagcgaaatgggaacagtcatgctgattcccgaagataaaataacagcagccaccgcattggcttcctgcggcattgcctacgtattgaaatatatccaggcagctatgcaagccggcatcgaaatgggactccgccccaaagacgccatgcaaatgatagcgcaatccctgaaaggagctgctgcattgattcaaaacaacgacactcaccccagcgtagaaatcgacaaagtgactacaccgggcggaatcacaatcaaagggatcaacgaactggagcacaacggctttacttccgccattatcaaagcgatgaaagcctccaaataacgccacaaaattattaatcataaaataccaaccacttgtatgaatgaccaaattaaacaaatagcagaacgcctccgcggactacgcgacgtactcgaacttacttctgaggatatcgcccgcgacagtgacatttctgctgaagagtaccgactcgcagaaactggagaatacgatatttctgtcagtatgttgcagaaaatagcccgtacctacaatgtcgccctcgatgccctgatgttcggcgaagaacccaaaatgagcagctactttgtaacccgcgccggcaaggggaccagtatcgaacgtacgaaagcctacaaataccagtctctggcagccggattcatgaaccgtaccgccgacccgttcatcgtcaccgttgaaccgaaaggagatgacgagccgatccattacaacaagcataacggtcaggagttcaacctcgtactcgaaggacgtatgcttatcaacatcgaaggcaaggaaatcatcctcaaccaaggcgacagcatttattttaactccaaacttccacatggcatgaaagcgctcgacggcaaaacggtacgttttctggcagtaattatgtaataacatcatggtagaaagatttttatcacagacctcctttacctcacaagaggatttcatcaagaacctgaaaataaacgtcccggaaaacttcaacttcggttatgacgtagtagatgcctgggctgccgaacagcccgacaagaacgctttactgtggacaaatgacaaaggtgaaagccgtcagttctcatttgccgacatgaaacgttacacagacatgacggcttcctatttccaaagtctgggcatcggccgtggcgacatggttatgctgatcctgaaacgccgctacgagttctggtatagcacgatcgcccttcacaaactgggagcaaccgtcattccggccactcatctgctgactaaaaaagatatcatctaccgttgcaacgctgctgacatcaagatgatcgtagctgccggcgaaggaatcatcctgcaacatatcaaggacgccctgcccgagtgccctaccgtagaaaagctggtcagcgtcggtcccgagattccggaaggattcgaagacttccacgcagggattgagagcgccgccccgtttgtacggccccgccatgcaaacaccaacgatgatatctcattaatgtatttcacttccggcaccaccggcgaacctaaaatggtggcacatgactttacctatccgctgggccatatcgttaccggcagcttctggcataatctgaacgaaaacagccttcaccttactatcgccgatacaggctggggcaaggccgtgtggggaaagctctacggacaatggattgccggagcaaacatctttgtctatgaccacgagaagttcactccgggagacattctggaaaagatacagaattatcatgtaacttccctctgtgcacctcccactatcttccgcttcctgattcacgaagacctgacgaagttcgatctgtcttcactcaaatactgcaccattgccggagaagcattgaatcccgctgtattcgatacattcaagaagttgacaggcatcaaactcatggaaggtttcggtcagaccgaaactactcttaccattgccactatgccttggatgcaaccgaaaccgggtagcatgggattgcccaatccccaatatgatgtggacttgattgaccatgaaggccgttccgtagaagccggagagcagggacaaatcgtaatccgtaccagcaaaggtaagccgctcggtcttttcaaagagtattaccgggatgcggaacgtacccatgaagcttggcacgatggtatttactataccggagacgttgcctggaaagatgaagacggttatctctggtttgtaggtcgtgccgacgacgttatcaagagttccggctaccgcatcggcccgttcgaagtggaaagtgccttgatgacacatcccgcagttgtagaatgtgccattaccggagtgcccgacgagattcgcggacaagtggtgaaagcaacgattgtattgtctaaagaatataagaaccgcgcgggagaagaattaatcaaagaattgcagaatcacgtgaagaaagtgactgcgccctataaatatccgcgtgtaatcgagttcgtagaagaacttccgaaaacaatcagcggtaagattcgtcgtgtagaaatccgcgagaacgatcagaagtaaataaaaaacgaccatttcatcgataaaatcctcctttagctgcttcccaacagcctaaaggaggatttcttttcatgcacaatgctacaaattggtcaacttatgcaaattctggttcaatgaatcatttgtatactatatctgaatcaaaattacacgtctaagtcgtttttgtctcttatctttgccacagtaaaaataaaaacacactataaagattatgattacaagtagaaagatttctcaagtcaatgtttttgctggtagtccttgggaagtagccagcgtaaagaatctgctgaaagcagcatatattgaggtttcaatgaaagagaatgggcggaacggtttcctcttatctgtcccttgcgaatattatacggcagcaatgcgtgtgattggcaatagaaagatttcataggttttaggttaatatattcaggattgagtgccgattgtaatgggggttgcaatcggcttgttttattatcagcctactgctttaccacccactctcccctatgacctttccgttcagctatacttgcctttcggcttaagcccccattaaacatccgtcatacagtaggtattcatctgttatccggtaatgattgttcgcaaaagccgccgttataattaactcgccacagccgtggaaagtattcgccacggccgtggaaggatctctccacagctgtgagaagaactcgtcacagccgtggcgaattagtaataccagtatcctgacagaataataccggtatctcaacacaactataccggcttcccttcttataaagtcttacttagcctgcccgtaaacaagcaacttcagtctttattgtgttcaagctatgtaacaacttacaccacaaacaatccatgcatgccctgctacccgtagcgaacacttataatcgcaagaaatcaagataagaaacaatgacgattacacaaatcaggaagaagaaagatacggtactgtatctgaaccgagcagtgtacttctgtcccattttagaaataaataaggcacgaggcaaaaaataccaataaactgataaagaaaaaaataattgtgaccggccatattacaagatttccatatctttgcccactataatttattacaacgtattaaatcaataataacatgaaattcaattaccacattatcatccttttgcttttaattgtccgattgttcacaccaagtacggcaaaggctagccaaaactacatcaacaacctatatccctccgacaatgatgaatttgaaactttaatggagaaaataaggaaagactttgcacagaatccgcttattgacgagtttctacacaaatacgataccgccaaaggctgtttcaccgacgtggactacagccgccgcgaccgtacaaactgggaacctctcactcacatagaccgactgtatgattttgcatttgcctacaccaaccctcagaatacttactatcagaacgaagatatctataataagatagtgaaagggctggaatattggtatgaacgcaatccgaactgcaacaactggtggtacaaccagattgccgaaccgcagaaaatcggtatactgcttatacagatgcgtgtcgggaaaaaacagataccggcagaattggaaactaaaaccttgcaacgtatccgcaaagaaggaggagatcccgccaaatggaccggtgctaacagaaccgacatcgcacttcactggatttaccggtcatgtctggaaaaaaacgaggccgacctggaaacggctctcgcaaatgcttacagtccgatagaatatactgtaaaagaaggtttccagcacgacaactcttatttccaacatggcgtacaactttatatcggtggatatggcgatgagatcctgaaaggaacaactcaggtggctatgtatacccaaggaacaaaatatgccttgagcaccgagaagatacagctgttaagcaagttcatgcgccaaacttattatcaggccatacgcggaaaatatatgcttttcgatgtactgggcagaggcataagccggaaagatattaccgacaaaagcgccaccgccctatttgccgaacgtatggcggttctcgatccggaacatattgaagagtacaaagctatcatcgcacgtctaaaagatgaacaggctgccgactacaaactaaagcctctgcatacacattatttccgaggagactataccctgcacgtacgccccggctatacgttcgacgtccgtactgtatccacccgcaccatgcgttgtgaatacggcaacggagaaaacctcaaaacttatttcatgtcggacggatgtaccaatatcgtaactcaaggaaatgaatataccaatatcttccctgcatggaactggcgcagaatccccggaacaacggctccgcaactggacacgatcccaatggccgcgagcgactggcagactcgaggaacttccacttttgccggaggggtgtccgacagtatctacggagtgtccgcctatgcttacatggacaattatgccggtgtgaataccggagccaaaaaagcctggttctttttcgacaatgaagtggtgtgtttaggatcaggaatcaattctacttcatacgcacctgtatacaccacaatcaaccagtgtttgcttgatgacaagaacatattattatcacagaacaagcagcaaacgacaataaagaaaggagaattttcctacgattctcccgattgggtattacataacggaatcggatatatcttccctcaaggcggcaggatattcttatgcaatcagcaacaaacgggctcatggtatgacatcaaccatacagaatcgaaagaaatgcaacaacgggaggttttcacactcggattcaatcatggaactaaccctcgtaacactacttatgcatacatcatagcaccgggaataacttctgcccgacagatgaatgcatacaataaaaagaatgggattgaaatcctggcaaatacggatgccatgcagatcgtaagaaacaagaagctgaatatctggcaaatggtattttaccgggaaggaactttcactcacaaagatattactgtaaaagtagataaggcatgcgcattaatgctcaaagatatctatcaaagtagtgcagaactgcacattgctgatcctgcacagagtcagtcgtgcatcaaagtggatgtatacatccccaaagtttccaaaaacacccgtagtatcttatgtgattttgaaaagacaggcatctacgccggtgcatccaagaaatactctctttaatataatacgagttgagtgctaaaaccggaagatattcaggcccgtcagacaatacattaaccgtggctttcatatacacttccggtttacctcccggtttacataaagctcataaatcaaactcaaatccggttttagtcagtatcaaagacaaaataacgccataactggtacataaacaaaaagctccgtaaatcaaagatttacagagcttttaatcaggaatactcgtactcgaagcgggacttgaacccgcacagccgcaatggccaaaggattttaagtccttcgtgtctaccattccaccattcgagcatcctttcaaagaaagagcggaaaacgagactcgaactcgcgaccctaaccttggcaaggttatgctctaccaactgagctatttccgcgtattttcaacgggtgcaaagataaacagtttacttgtttctgccaaatcttttcgaaggaaagtttaaaaaactatccttcgaaatgctgtttatcgcccaagaagtgccttttcagcttcttccatcccacagaaattgaaaccttcaacggtctgctgcatcaatgcggagatttcggcattacataaattaccaatactgccttcgtgcgtatgatgtacttctttaccatgagagaattttccggcctcaatatccagtcccacctttttataagcatcacggaaaggcataccttcacgagccaaacgattcacttcttctacactgaagataagcagatacttatcatcgtcaagaatatgttcgttcacttttatctcgttcattatataggtcgtcatctgcaagcaatctttcaattcctggaaagcaggaataaagacttcttttataatctgcaagtcacggaaatagccggatggcagattattcgcaatcatcatgatctgttgaggaagcgattgcaatttattacatttggcacgtgtcaattcaaagacatccgggttcttcttgtgtggcataatactagaccccgtagtacaatcatccggcaactttacaaaaccgaagttctgactgttgaacatacaagcatcaaaagctagtttggatattgttccggcaatggttgccaaagcaaaagccacattacgctccatttttccacgtcccatttgagcatatactacattgtagttcagcgaatcaaaaccgagcaaacgagttgtcatcgtccgatccaatggaaaagaagaaccatatccggcagcagagcccagcggattacgattgcacatcttaaaggcagcctgcaagaataacatatcatctaccaagctctcggcatatgcaccgaaccacagtccgaaagaggacggcatagcaatctgtaaatgtgtatatcccggcatcagtatatccttatatcgctcactctgattaaccagcacatggaaaagttgctctaccgcctcagcgatttctttaatttgtgtacgggtaaagagcttcaaatccagcaacacttggtcattgcgtgaacgcccgctatgtatcttctttcctatgtcacccaaacgccgggtcaacatcagttccacctgtgaatgtacgtcttccactccttcttctatcacaaattcacctttttcggccgaagcatatatattcctcaactctgccaacaattgcacgagttcctcctttgtcaacaaaccgatactttcgagcattgtgatatgagccatagaaccgagcacatcatgtttagccagataaaggtccatttcgcggtcacgacctacagtgaaacgttcgatatctttattcacctgtacggatttctcccaaagtttctgtgccataaaaacaagtattagtaattaataacagccagcatttcaaccattttctccaacccctcctgaagcggtttctgtaccatcgctttcataaacggattaatatctatttcgatagtcactttcacattacattcctcctcagcagtttcaaccagttgaatccacatattaaaaggaagcggtgaattggtagttgccagtttaatggatttacaaggatcacgttctacaatttgcagcgtcaactgccctacgggagagactgtaaaactcaacgtatccgaatcaaaacttaaatcttccactttatcctgtggcaaacggtctttgatagcttccagattgcttaaatccgaaagcttattatatacacgttcctgactataaggtattaccttgacactactctcaaaatttgccataaatatctgttagtataaaataaaaaaagaacgacccgaacagttactgtccgaatggttctttcttttaaatatttgaattaacaataaaatcttactttccagcatcccaatgcgcggggtccttacgccattcattcaatgtttgtatgtcttctttttcgatataacctgtacgaagtgccacatcaagcaccgcttcataattggttaatgtcaccaaagacactttcgcatttttgaatgcctcttcggcaaccgggaatccataagtaaaggctgcaaccataccgattacttcgcaaccatcgcgacggattgcctctactgccttcaaactactaccacctgtagaaattaaatcttcaaccactacaactttcatacccggacgaagttcaccttcaatcaagttttccaatccgtggtctttcggggtagaacgaacatacacgaacggcagatttaatgcatcagctactaaagctccctgcggaatagcacctgtagctacaccggcaatcgcatccacctgtccgaatcgttccaatatcagacgtgtaatttcaatcttcacaaaattacgaagagaaggataggacagagttttacggttatcacagtaaaagggggatttccatccagaagcccatgtgaaagggttagcgggctgaagtttaatagctttaatcttcaacagtttctccgcaaatagtctctctaagtttttcataactaaactaactattaattatttgccgcaaaagtacagaaattgaacgagaataaaaagaagaatccgttatatttttttagtcgaccaattcctcttcttcaggaacatcgatacaacgcttgatatcttttagttcaaatccacgactcatcgcaaacctcattaactttccattcaattcatagtcatcactggcatgaatacttttccgctttgaagctaacaagtcgcgcagaacggagaggtattcttcttcatcaatctcattcagataacgccatgccacgtcagaaggaatctttttcatataaagtccttgggcgattttcatctttccccacttggaaaaacggaacttatcattcacaaaagcacgacagaagcgttcatcatcaataaacttttccgtctccagttggtctagaatgcgcgcaatggtttcataggcaattccccaacgttgtaatttctcatttatctctgcccgacaatgctcggcagtagagcaataagaggctacgcgattcaaagcctcttcatcagttaattgtgcactcatcggttagctgtaactattctatcttttccaaatatgtctttaataacacgaacatcacgatattggttcatttcaagtatgtgtgctgtttcccggccataagcctggttgatttcaaaataaagcttgccacccggcaaaagtaagtcgcaccccagacgggcaatccgacgatagaaccgcaaaggatcatcatcggggacaaacagggcaagtcccggttcccaatcaagtacattggcttccatatcctgcttctccgcctcagttatataaggtggattgctgacaataacgtcataacaagaagtcgcgccgagttcatcagacagcacatctctccgtcgaaacataacccgggcgtccaactctttattattttcactagctatggctaacgcctcttccgaaacatcccaagcctctacttctgcatccggaaggttctgatccaaagagattgcgatacatccgcttcccgtacctatatctaataggtgacgggcacccggattctccttcactatcaattctaccagctctgccgtttccggacgaggaatcaagacaccgggagcaactttaaatttccttccgcaaaattcagcaaagccgcgaatgtactgtatcggctcatttttctgcaaacggaatataatgttttctaattcacgctgtttgcattcggataaaattatatctttgcccatgtaaatatcaagcgcatctaaacctaacatgtcgcaacagatcaacatcgaaagagcttttacctcttccggaggataaatatcctgtaatgactgacggatgtaagtagtgatacgattcatattttcacaatttcggagtgcaaaagtaagaataatatagcgaagagcaccaaaatggaagaagaaaaatacatgagacgttgcattgagctggcaaaaaatggtctatgtaacgccgcccccaacccaatggtaggggctgtcattgtatgcgacggacgtattatcggcgaaggttatcacattcgttgtggagaagcgcacgcagaagttaatgcgattcgttccgtcaaagacgaatcattattaaaacgttctactatttatgtcagtctggagccatgttcccattacggaaaaacgccaccttgcgctgacttgattatagagaaacagattccacgtattgttatcggttgccaggacccgttttcacaagttgcaggaaggggtatccaaaaactaaaagatgcaggacgggaagtaattgtaggcgtattagaaagtgaatgcagacagttgattcgtcgtttcatcactttcaacacgcttcatcggccttatattactcttaaatgggcggaatctgccgatcattttattgacttggaacgaacggacgggcaacctgttgtactctcctctcctctgacttcaatgctcgtacataaaagaagagcagaatctgttgctatcatggtaggcaggcgaacagcattactagacaatccttctctgaccgtacgtaactggtatggacgaaatccgatacgtgtcgtattagaccgtacgttgtctcttcctaatgatttgcagctatttgacggcaatgtgccaacattagtctttacagcaaacaaacatccggaagcgaagaatatcacatatatcacaatcgactttaatcacaacctattcactcagataatggaagaactctatcaacgaaaaatacaatcattactggtggaaggaggcagccaacttcttcagtcatttatagccaatgagttatgggatgaaatatatatcgagaagtgccccaacaagctatattccggtgttaaagcacctgaaatatgcgataaatttagttattcgacagaagaacacttcggaagacagttttggcattacattcatcaagataagctaaaatagtcctattcagggagttttacgtcgataaaatcgacgttattatctataattttatataaaacttgctgggaatgttctttatcggaaaaaatgtttctatttttgcaacttgtaaataaacacaatctttcaaatgagaataaagtttttatcatttattgcgagttttttcatggtgtcattcgttataacgtcatgtcttgacgatgataacaacatcgaatatagtccggacgcgactatacatgcgtttgaacttgatacaacaggccttgggaagtataaattcactattgaccaattgaaaagtgaaatctataatgaagattcacttcctgttcatgctgataccattattgataaaattctaataactaaattgactacagcgtccggtgtcgtgacaatgaaagaccaaagcggcaaggattctatcattaacatcgcagattctattgatctcagaaagcctatcaaacttaaagtatggtcaacagaagcattggccggcacttctcctgatcaaacaagagaatacacgattagtgtacgagtacataagcatgatccggattcattgaggtggaattatgttgctaatattagtaattctgagtccattaaagaacaaaaaacagtcattttaggagagaacattcttacttattctgtagtggataatgtcctcaaagtatatattgcacaaaaaggaaacgcaatgtcatgggtctcaaactctttggaagagaatccatttaagaatagtcttccttcttcaatattgtcatacaacaataaattatatgcaacaacagccgataataatgacggtaacgtgtatgaatctaccaatggtataaaatgggagacttcaggcttatttgaaaatgaacatgtaaatctactcctagctcctttaagtaataaaataacatacatcaagacaataaatgaaacaaaagtttttgcttctactaatgaaataacttccaacgcaaaaacagaccaagaacttcaagttgtaccagatgacttccctattggaaacatatcttatacaacttatactacagcaactggtcttgaaggaattatgctcatcggagaacatgctaaacagccaatagccggagatattgaagctatcgttccatggggatatatgggcagtatatgggtttcattcccaccaaataacgaagagacaagctgcccggtactacaaacccctaccattatgtattataacaaccagttctatatctttggagagaaatttgaatcattctatacctcagaagcaggtcttgcatggaaaaaagcaaataaaaagttctctttcccttatcaggactggagcgaagctgattttaagccaagtaaagagcaaccggaattcagaggtagagaaacctattcctctgtattagacgacaagaatgactatatatatattttatttagcggaggaactgctagttttgaggaagaagtggaagatgaggaagatgaggaaaaaagtagtaaagctactaaaacacatacctacacttatgaatctgaagtatggcgcggtcgtttgaaccagctatggtttgacaaggatccgctaaatgccggtaaataataaacgtatacgtttaaaataagaagatgtcctatatagagcaaatagacaaaactcggatcccccaacacgtagctattattatggatggcaacggacggtgggctaagcaacggggaaaagaacgtacttacggtcaccacgcaggcgcggaaacagtgcagaaaatcacagaagacgctgcacggttgggaattaagtatctgactttatacaccttctcaaccgagaactggaatcgaccacagaaagaagtgtcggctctgatgaatctattgttagattctattgaagaggagacattgatgaagaataatctccgctttcaagtcatcggtgatttcatgaaattacctgctgatgtgcaagctagtctgaaagcatgcatagaacatacagttcataatacaggtatgtgtctggtgttagctcttagttattcttcccgttgggagataactgaagcagcccgacaaatagcagcacaagttaaagcaggagaaatatctcctgaacaaataacagatgagtacatatcctctcacctatcaacaaacttcatgcctgatccggatctgttgatccgcacggggggagaaatccggttaagcaactatatgttatggcaatgtgcttattcggaactttatttttgtgataccttttggccggattttgacaacgaagaactctataaagctatctgcgaatatcaacaaagagaacgcaggttcggcaaaaccagtgaacaaatcagctaacattattcgaaacatcaaattataacataaatgcattatcgtatttcctttatattcgtaacgtttatctgtctgttctgttttgtaacaacaggcattgcgcaagaagccaacactgatgaagactcgaaacctgtcatcttatactccggtacaccgaaacagtatgagatagcggatatcaaagtcgaaggcgtgaagaattatgaagactatgtattgattggaatatccggattatcggtaggacaaacaattactgtgccgggtgatgaaatcactggagcaatcaaacgctactggcgtcatggtttattctccaacgtacaaattacagccgaaaaaatagagggtaacaagatctggttaaaaatcagtctaacgcagcgtccccgtatctctgaggtacgttatcacggcgttaagaagtcggaacgcaccgatttggaaggtaagctgggaatggtaaaaggtatgcagatcactccgaataccgtagaccgcgcaaagacacttatcaaacgatattttgatgacaaaggatttaaaaatgccgaagtgatcatttcacaaaaagatgatccatccagcgagaaccaggttcttgtagatatcgatatcgacaagaaggaaaaagtaaaagttcacgagatacaaatcgttggaaatacagctatcaaagcttccaagttgaaacgagtaatgaagaaaaccaatgaaaaaggtaaacttcgtaacttgttccgtactaaaaaattcgtaccggaaaactatgaagcggataaacagcttatcatcgacaaatataatgaattaggctaccgtgatgcaatgattgtaaaggacagcatatcacagtatgacgaaaaaacagttaacgtctttctggatatagatgaaggtcagaaatattatctccgtaacgttgcatgggtaggtaatacgctctatccgtcggaacaattaaactacctgcttcgcatgaagaagggtgacgtttacaaccaaaagttactgaacgagcgtatttccacagacgatgacgctatcggcaacttatactataacaacggttacctattctataatctcgatccggtcgaggtaaatattgtaggtgactctatcgacctcgaaatgagaatctatgaaggccgccaggctactattaataaaatcaatattagtggtaacgaccgtttgtatgaaaacgtagtccgtcgtgagcttcgtatccgtccgggacaattgttcagcaaagaagacttgatgcgttctttacgtgagattcagcaaatgggacactttgacccggaaaaactgcaaccggatatccaaccggatcctatgaacggaaccgttgacataggtttgcctttgacttctaaagccaatgaccaggtagaattctctgccggttggggacagactggtatcattggtaaactgagtttgaagttcaccaacttctccatagccaatctgctgcatccgggggaaaattatcgcggtatcctgccacagggtgacggacagacattgactatcagcggacagacaaatgctaagtattatcaatcgtatagtatttcattcttcgatccttggtttggtggtaaacgtccgaactcattctccgtatccgccttcttctctgtacaaacggatatcagtagccgttactacaattccagctactttaacaactactacaacagtatgtatagcggttatggtggttatggcatgtacaattatggcaactacaataactacgagaactactatgacccggacaagtctatcaaaatgtggggactttccgttggttggggtaaacgtcttaaatggcccgatgactacttcaccctttctgcagagttggcttatcaacgctacaacctgaaagactggcagtactttccggtaactaacggtaagtgtaatgatttgagcatttcattgacgttggcacgtaactctattgacaacccgatcttcccgcgctccggttcggatttctcattatcagtacagttcactccgccgtattcagctttcgatggcaaggattataaaggttactactctaaccctaaaacaggtagtatcacccaagacaatatgaacaaacttcataaatgggtagaataccacaaatggaaatttaaaggtaaaacatataccccgttaatggaccctattgctcatccgaagtgtctggtattgatgacacgtacagaattcggtttgttgggtcattacaatgaatacaagaaatcaccattcggtacatttgatgtcggtggtgatggtatgaccggttactcaagctacgcaacagaaagtatcgcattgcgtggttatgaaaatagctcattgacaccatacggttccgaaggttatgcttacacacgtctcggaattgaattaagatatccgttaatgctggaaacaagtaccaacatttatgtgttaggtttcttggaagctggtaacgcttggaatgatatcaagaaattcaatccgttcgacttgaaacgttctgccggagttggtgtgcgtatcttcctgccgatgattggtatgatgggtattgactggggttacggtttcgacaaggtatttggttctaaacaatatggaggaagccaattccactttatcttaggacaagaattctaaaatgtatcaccaaaaaactaaacgtcatgagaaagtctgttctatttatcactctgctgtttgccattagtatggcagctaacgcacagaaatttgcattgatcgatacggaatatattatgaagaatattccggctgctcaaagcgctaatgaacaaatgcaagaagctacgaagaaatatcaggctgaagtagaagtcttggcaaaagaggcacagaaaatgtttcaggactaccaagcgaaatcgtcaactctttctgctgcacaaaaaacaaagaaagaggatgaaatcgtagccaaagagaaggctgccgctgaactaaaacgtacttattttggtccggagggtgaattggcaaagatgagaaacaagctgattactccgattcaagatgaaatttatgaagcagtaaaggctgtatctcaacaacatggatacgacatggtagtcgatagagcctctgccgcaggcataatttttgcaaatccgcgcattgatatcagcgatgaaatattaagaagattaggatattcaaattaatttcatacatttgcaactggaaataactaaaaatcattcaaataaattatagaactatgctaaaaaaaatcgcacttgtaatgttgcttgcactcccaatgggtgtatttgcacagaacttaaaattcggtcatattaacgcacaggaaattatcactgtgatgccggaattcacaaaggctcaaaatgacattcagaatttagaaaaacaacttactgctgaacttcaaagaacccaagaagaattcaacaagaaatatcaggaattccagcaagctatcgctaaggattctcttccggctaatatcgctgaaagaagacagaaagagttgcaggatatgatgcaaagacaagaacagttccagcaagatgctcagcaacaaatggcaaaggcacaaaatgatgcaatggctcctatttacaaaaaattagatgacgctatcaaggcagttggtgccgctgaaggagtaatttacatcttcgaccttgcaagaactccaataccttatgttaatgagacattaagcatcaacctgactaacaaggtaaaagctaatctcggtattaaataagcaataagagtaagaaattctaaaagggaaagggaaaagaagcacagacttctttctctttccctttttttcatgtacatttgcgtatataaattctcatccgttatgaaacaacagttaccctatacacccggaccgatcggagtatttgactccggatacggcggactgactattctcaataagataagagagatattacctgaatatgactatatttatctgggagataatgcccgtacaccctacggaacacgttcttttgaaatcgtatacgaattcactctacaagcagtcaacaagttatttgaattgggctgccatcttgttatattagcttgcaacacagcctctgccaaagcattgcgtagtatacagatgaacaatctaccgaagatagatccggaacgtcgtgtactcggagtaatccgtcccacggtagagtgcatagggaatataacacaaagccgacatatcggaatattagcgacagcaggtacaattaaatcagagtcttacccgctggaagttcataaactataccccgatattcaagtaaagggagttgcctgcccgatgtgggtaccattagtagaaaataatgaagcacagaatgaaggagcagattatttcatccggaaatatataaatcagttattgcagaaagactcacagattgacactgtgattctgggttgtacacattaccctctgctacttccgaaaattcagcaatatattccggataatatccgcgtgatcgcacaaggtgaatatgtcgccgaaagcttaaaagattatttgtgcagacacccggaaatggatattaaatgtactaaaaataacagttgtttgttttatacaacagaagcggaagataagttcatcgagtcagcctcgactttcctaaaccaacagattaatgtaaaacgaatcacgctcgaataaaattctggaaaagaataactatttattgccatttcttgttatatttgtaaacaacaacccttaataccataagatcatgaaagaagaagattacagcaagtcgatagaagtattctccggctctccgtgggaggcagaaatcatcaagggattattagaaagcaatgacattcgctgcgttatcaaagatggaattatgggtacattggcaccctatattgctccggcagtctctgtccttgtcactgaagacgaatacgaatccgccaccgaactaatcagaagtcgagctgaaaaagataacgactaatacacttcaggccttctctgatattcttcagtgaattggcctaggaggaccgtatgcatatttttcacctcccgtacccaaattgacacagggagtaatattgatgtgtgcactttcaaatatgatgaaggaagtcatctgttctacttgtagattcgtatatttcattatttactttttctctatcaggatgctaagataattcttttcagcccgttttggtaacatatcgataaaaagttctatatttgtactttcaaatcgtcagtaaattagcaaaaatgaaacaggtatttacacgggttgcagtaaaggtcggtagcaatgtattaacacgccgagatgggacgctggacgttactcgtatgtcagcgcttgttgatcagatagcagaattgcataaatcgggagtggagattattctcatttcgtcaggagcggtagcgtcaggacgtagtgaagtatccccacaaaaaaaactcgacagtgtagaccaacgccaattgttttctgcagtaggacaggcaaagttaatcaatcgttattatgagcttttccgcgaacataatattcctgtcggccaggtattgactacaaaagaaagttttggcacacgccgccattatctcaatcagaaaaactgtatgacagtgatgcttgcaaatggagtaattccgattgtaaatgaaaacgatacgatttctgtcagtgaactgatgttcaccgataatgatgaactatccggactcattgcctcgatgatgaatgtacaagcattgattatcctcagcaatataaacggaatttataatggttctccttcaaatccggattcttccgtcattcgtgagattgagcatggaaaagatctatccaactatatccaagcttccaagtccagtttcggccgaggggggatgttgacaaagaccaatatagcccgcaaagtagcagatgaagggattacggtaattatcgccaatgggaaacgagataatatcctggtcgacctgcttcaacatccggatgaaactctctgcacacgattcattccttccaacgaaccggtatccagcgtaaaaaaatggattgcccacagtgagggattcgcaaaaggtgaaattcacattaataagtgtgctaccgaaatactaaattctgaaaatgcagtcagtattcttccgatcggtattacacgtattgaaggagaatttgaaaaagacgatattgtgcgtatcatggattttcagggaaatcaggtaggaatagggaaagtaaattgtgatgctaaacaagcaaaggaagctataggaaaacatggtaaaaaagcggtagtacattacgactatctatacattgaataattaatcgaaagaaaaaaaagtgtatggttactaacttaaacgaaaccttcgctgccgtacaagcagctagccgtgaattggcaatcctggatgacacaataatcaatcagatactaaatgcagtagctgatgcagctattgcagagacaccgtttattctggcagaaaatgaaaaagacctcgcacgaatggataagaatgatccaaagtatgaccggttgaaactgacagaggagcgtttgaaagacattgccacagatacacgtaatgttgcaacgcttccctctcccttaggaagggtgttgaaagagaccatacgccccaacggaatgaaactgaccaaaatcagcgtgcctttcggagcaataggaatcatctacgaagcacgacctaatgtgagtttcgatgtattctccctttgcctgaaaagcggaaatacctgtgtattgaaaggaggaagcgacgccgattattccaaccgggccattatctgtgttattcacgaagtactaaaagaattcaatatcaatccacatattgtcgagctactcccagtcgatagagaagctacaacagcattactaaatgcagtaggttatatcgatctggttatccccagaggaagtagtaaccttatcaattttgtacgcaacaatgcaaaaatcccggtcattgaaacaggggccggtatttgccacacttactttgatgagtttggagatgtaagtaaaggggcagatattatttataatgccaaaacacgcagagtcagtgtatgtaatgcattggactgtactatcgtacatgaaaaaagactggataagcttcctttgctttgcgaaaagttaaaagacagcaatgtgattatatatgccgatccgcgagcctatcaggcattagacggccattatcctgccgaacttctgcaacctgcaacgaaagaaagtttcggcacagagttcttggactataaaatggcggttaaaacagtgaagagttttgaagatgctttgaggcatatccaagaaaacagttccagacacagcgaatgcatcgtcacagagaacaaggaacgtgcagcgttgtttactaaaatagtagatgctgcttgtatatatactaatgtctctacggccttcaccgatggagcccaattcggtttgggagcagaaataggtatcagtacccagaaattgcatgcacgtggtcccatgggattggaagaaatgacctcatataaatgggtcattgaaggaaatggacagacaagatggtaatatgtatgtaatagtgaactataaactgtgaatagcaaacagttgaaagataaatcgtataataacgaattaattatagaaaacatgaagaaatttacttgtgtacaggacatcggcgatttaaaatcagcccttgcagaagcatttgaaatcaaaaaagaccgcttcaagtatgtagaattaggacgtaacaagacattaatgatgatcttcttcaattccagtctacgtacacgcctcagcacacagaaggccgctttaaatctgggaatgaacgtaatggtgttggacatcaaccagggtgcatggaaactggaaacagaacgcggtgttatcatggacggcgacaaacccgaacatttactggaagccatccccgtcatgggatgttactgcgatataatcggagtacgctcttttgcacgcttcgagaatcgtgatttcgattatcaggaaacgattctgaatcaatttatccagtattcgggacgccccgtattctctatggaagcagcaacccgccatccgttgcaaagtttcgcagacttgatcaccatcgaagaatacaaaaaaactgtacgcccgaaagtggttatgacttgggctccgcatccgcgtccattaccacaggctgttcccaactcatttgccgaatggatgaacgccaccgactatgatttcgtcattactcatcccgaaggctatgaactggctccacaatttgtaggaaatgccaaggtggaatacgaccaaatgaaggctttcgaaggagccgactttatatatgccaagaactgggcagcctatgcaggcgacaattacggacagatattgagtaaagaccgagaatggactgtcagcgaccgacaaatggaagtgactaataacgctttcttcatgcactgtcttcctgtacgcagaaacatgattgtgacggatgacgttatcgaaagcccgcaatctatcgttattccggaagctgctaaccgtgagatctcagcgacagtcgtcttaaagaaattacttgaaagtctataacatcatgttcaaaagtaaactaataatcatattgctatgcctgtgcgttgttgcaggcatagcaaatgcccaagaaaaaaagcctcaagtaatacagtcagaaccacaattagaagatatctataatgtactggaagctatggacattcacatgttccgttttgaattaaaagagtttctgaacaaagtatatacggtcactgtctacatggatgagtatgaaaatggaaaatcccccaaacaagtgcataatatcagactcgggaaaaacattcagtctttaaatgcagtaccagaagaacatcgtcaagctttccgggaaataaaacatattccggaaggcaagaacgaatgggagaatatcaaagagatgtcaatatatcttagaaagtccaatgattcgacttcagtttgcactattaatgtaccgggaacgatgaaaggtggtgcaccattaaaattacaggcaatagaaaaataccactcttatatttattacccgcgcctatttaaatttcagcctatacaagacacagaccatttgaaaattcctttaattttatatggttccgcttggctggacaagcaacatgacatcatccgattttgtggagaaagagaaattgatccggaaatgaaagcagaaatccttaaagacataccccattattttgtaataggaatagagcttaaagctgagaaagagtgatcaactttttatttttagacatggactaaacgaatagacaattctctattaatatcaccgccacaccgtcaaaccaattaatccatgtctaaaacctatatttttcaccacatcgactaatgctcaatctccttgcctgcctcctgccaagaattgaatcccttatcaagttcaaagaccttataccctttctcactcagaatattcgcagcctttttgctccgcttgccgctacggcaatacacagctaccggtttatctttttgcaacagcgaatctgccattgaagcaaaagaatcatccattacattgatattgattgtctttgcaatatgtccttccgaatactctgccaaagtacggacatccaaacgctgtatatcctcattctgaatgaggttatcaaaatcatccacgttcatagacttgaaatctcctttctgctgacaagagaaaagagaagagagaaataaaaataatcccacagctagttgattcattttaaacatcatactctattattcaattcttatccggaacatattcaaatccggggttacagtacttaccagattctattgcagtgccgtccttatcatacgtataatatttgaacttaatcgttatcttttgaccgggattctctgcatccgcatatttatccaaaggaacagagagataagcacgacgattatagtactcctcatcaccattcgcatcatggtacaataacatatttacagtaccatttgtttcaaattcggacaaatcttccactatgccgaaaacatgctgtttaccaccattaaccttgagattcagaatcatattcagataacctcttcccaaccagatactgacaacatctaccggatcatgctttaacccgtctttataagttggatcatctgccggtttaggtgtcggcgtaacaagagattgcaaagaataaatcacagctgtagccgtgtgcccgttcgaaagcgtttcataattactcattacacgcctggaagtatttggcgaaatagcagaacccgtacgatctttagatacagtcaacgcttccccattatcaggtatcaacgtctgtatactaccatccgttccagccttcactgttacaaattccaatttaaccgacggataataataatcatcctccccacaagcggacatcagcaaaagtaatccccaaaaccagactatatgtaactttcttattctcatcgacacgcagctaaatggtttattaatggattggcatacattaataacaacttctcacgcagaaaagcttcatccttattaggaatctctattttacccaattgttgctcaatatagcctacaaactgctgtttctcctcctgcgaataaatcccggtaaactctgtcgtcccattcaaccagtcataagcaacgtaatttcccggatacatccggtaattacgataaattctctgatcaatacaagcagaaatagcagcaaacaattccggtttcggtaacgagcggtctatttgttccagttcatcatttatgcaagaagcaacttgaaaatgcaccttacctttatatccgaaaagcccggtttgcatattaatcaagtcgtcttgtgttgtttttttatatccttctatatcccttttcaactgaaattcccgtgctttcaggaagtcgcaaggatcatattcgtatgaaatggcaagcggagcaatattcatttccttcaagcgatctatcaaatctccttcacctcccattgccagcattttcaggacactatcttgcgtgcggtcattagaatccttcgcccgtccttcacgctgtgcaatccaaatagattgatttttctctgcaatggtataatgcatatatcgggacatccgcgtcgaagcctccaacatctggcgcatcgtaagtgcccgctgaacaataaaagacttgttgacacgcaccagcttctttatccaaggataaataagtaagttatcaccaatagcaatctctaccgtatccattccctgatcgaccaacagaatagaaaggaagcctgaatccaagataatatccctgtgatttgaaatatatgtataggctttcttcttattcggcaaagcattgtgatctaatgtcagcccatttgtatgttcttctgctatcttccacaaaataccataacaaaatgctttctggaaatcaagtttcgtcttacacgtacgcattttctgcgccagaagttcaaatggaacgttcggtatagctccggtagcagctttccgaaaagccggatcggcaatcagttcctcaaagatttgaggaagctcctcatcattataaggacgaatctcattaaactctgtcagatccataacggtaattaaaatttattttcgataatatcagtcatcacatcctttatctccagaccggcagcacgtacttgctggggaataaaacttgtcgcagtcattcccggagtggtattcacttcaagaagattaatcttttcaccggctgtaacaatataatccacacggataatgccggaacaccccaatatatcatagatagccgaagtcaacatctgcacccggtcggtcagttcgtccgaaatgcgtgcaggagttatctcgtctacctgcccattatatttagcatcataatcgaaaaactcattatgagtcactacttccgtaggcggaaaaaccactgacttttccttggttttataacaaccgcaagtcaattccgtaccttccataaaagcttccacaagcacttcttccgcctcaccgaaagctttaacaatagccggttggatttgttctttcgtcttcaccttcgtaactccaaaactggagccacccagacttggtttgataaagcaaggcaaaccaatcttttccaagacatcctcgtcggacaccgattgtccctgacgcaataacaatgattcggcaatacgcactccaaaggctttcagatattgattgcaagcgaacttatcataggtaatggcagctgccaacactccacaacaagaatacggaatacgcatcatatcgaaataaccttgcaaacgtccatcctcacccggcgtaccgtgaatggtgatataagcaaaatcgaacacaaccttttccgttccgttcataaaactaaagtcatttctgtctaccggtactttatttccgtccggtaattgtacctcccagcgacggccctccatctctacgatgtacaaattatacttttccttgtcaataaaggagtaaataccctgtgcactacgcagggaaactacgatttcagaggtatcccctcctgctacgatagcaatgttgcgtttcattctaattctctgttacttatatagcctctccacttctcgataagccgggccatgtcatccggaagttcggaagtaaaatacatctcctcaccagtgacgggatgcacaaagcccaacgtcatagcatgcaaagcctgtcggggacaagtgtcaaagcaattatttacaaactgtttgtacttactaaaatgagtacctttcaatatctcatgaccaccataacgctcgtcgttaaacagtacgtgcccgatatgtttcatgtgaacacgaatctgatgagtacgtccggtttcaagtatgcactccaccaaagtgacatatcccaaccgttccaatacccgataatgagttacggcatgttttcctactgccgggtcggacatcaccgccatttgcatccggtccttcggattacgggcaatgttaccgacaatcgttccttcatcctgttccacagttccccacaccaaagcacggtacttgcgtttggttgtcttattaaagaactgcaatcccagatttgttttagcatccggtgttttggcaatcaccagcaacccggaagtatctttatcaatccgatgaacaagcccgacgtgagggtcattagcatcataatcaggcacatctttcatgtgccaggccagtgcattcaccaaagtgccgtgatagtttccgtgtcccggatgtactaccagccctgcaggcttattcacaaccattacatacttatcttcatatacgatattaagaggaatatcttcaggaataatttcattttcataacgcggacgatccattaccacagtaatgacatccaacggcttcaccttatagctactcttcaccggcttgccgttagccataacgaatccgtcttcggcagccttctgaatgcggttacgcgaagcgttgacaatacgttcgaatagatatttgtcgactctgaccatcgcctgccccttatctaccactacacggaagtgttcgtagagttgcgattcgtcaccgacaggttctatatcatccaagtcattttccaattcatcaggaagttcttcctctatcatgcgagtctgtttctgttgtttatcaattaaaaccaactatcatcttgtgtggatgatgattctgacgccaccggctcttccgtgtctagatcgatatcaatagaatcttcttccactgtatcaccggctccatctcctaccattaatgtcaaggaggctcccatagggattttctctcctgccgttaattggcgtccctgatatttcacaccatacacccagtctttctctccattgaccaactgtacttcgttcaatttaaacccggcactcagcaacttagcctgtgcttggcgaagcgaactgttatcagcaacatccggaatcacacgcaacggcacatccaaggtattaaccgtcagatagaccgtacgtccttctttaactttctcaccggcccccggcttcagttcaagaataattcctgccgctttatccttaacatacttagtatccgagatcaccgccaccaatccacgattgcggaacatctttgcagcctcttccgtagtcatacctttcacatcaggcacaaccacagtttctccatgatgggtgtacacatccatccatttcagcacaccgaatatcattactaccactaccacaatcatggcaacaatattcagccagaaaaatttatttgttttaaaagaaaagaattctttaatagtcatacgctttgctgttaatatgcgccaaagatacgacaaaatagttgaatttttgaatagtaggcaatgaaaaatgtcctacctcatgatgttaggacacttatcattgccggaattgttgcaactataatccccactcctatagatttcaacaaccttattattttcatccggggggttcatttcccgaatatattcccatattatacacagcttgtctacaaatactgattcatatcacaaagaaaagcaaaaaagcaacaaacaagaataaacagctgaatgttttaacattctattagcaaattaaaaatcagaagaaacaaaaaggcgaagaataactcttcgcctttttgtttcttctgatgactagtgattaccacttctgtccattgtactcatcagaaacagtcagtttctttctgccttttgcacggcgagcagctaatactctacgaccattagccgatgccattctctcacggaaaccgtgtttgttttttctctttctgttagagggttgaaatgttcttttcattactgtatcttgttttttatgttattattctacgtaatcgggctgcaaaaataggcactttttttaaattaaccaagagataactcatttttgctcaaaagtttttgtgttttttaccgatttagattacttttgcatccgaattcctacgaaaacaattaaataacaataatataataagaagaatagcagtatgattaatgctcaagacatcaaaaacggaacttgtatccgtatggacggaaagctctatttctgtatcgaattcctacatgtaaaacctggtaaaggtaatactttcatgcgtacaaaactcaaagatgtagttagcggatacgttcttgaacgtcgtttcaacatcggcgaaaagctggaagatgtacgtgtagaacgtcgtccatatcagtttttgtataaagaaggagatgattatatcttcatgaatcaggaaactttcgaccaacatcctatcgctcacgatttgattaacggcgttgacttcttgctcgaaggcatgactttggacgttgtctccgatgcttctacagaaactgtactctatgcagacatgcctatcaaagttcagatgaaaatcacatatacagaaccgggcctgaaaggtgatacagctaccaacacactgaaaccggcaacggtagaatctggtgcaacagtacgcgttccgttattcatcaacgaaggcgaaacaattgaaattgatacacgcgacggttcctacgtaggacgtgtgaaagcataattgttatataaatgacataaagaaacggtggatttgctacggcatctccaccgttttttattaactttgtgccacactaactctatacaaaaatataaaaaaatgaaaaagttaatctacacgttattctttgtcctcatctccgtcgttgcaaacggtcaggcaaagtacgtattctatttcatcggagatggaatgggagtcaaccaagtcaatggcacagagatgttccaagccgaattgcaaaacgggcgtatcggtgttgagccactactgtttacacaatttccggtagctactatggccactactttttccgctacaaattccgttaccgattctgccgccgcaggtacagcactcgccaccggaaagaaaacctacaaccatgcaatttccgtgaatgaagagaaaaatgccatacaaacagtagccgagaaggctaagaaagccggtaagaaagtaggtgtcaccacttcggtcagtgtagaccatgccactcctgctgcattttatgctcatcaaccggatcgtaatatgtattacgaaatcgctctagacctgccaaaagctaatttcgatttctacgcaggcggtggttttctaaagccaaccactacgttcgacaacaaaaaggctccgagcatcttccctattttcgaagaagccggttacaccgtagcacgcggttacaatgattacaaagcaaaatcccaaaatgccgaaaagatgatattgatacaggaagaaggagcaaatccttcctgtttgccttatgctatcgaccgtaaagacaatgatctgactcttgcccaaatcaccgaaagtgctattgactttctgactaaaggtaaaaataaaggctttttcttaatggtagaaggcggaaaaatcgactgggcttgccatgcaaatgacgcagctactgtattcaatgaagtaaaagacatggataacgctatcaaagtagcgtatgaattctacaagaaacacccgaaagaaactcttatcgtagtaacagccgatcacgaaaccggtggtatcgtattaggtacaggcaaatatgcattggacctaaaagcacttcaacatcagaaacattctgctgacggcctttccaaacgtatcagcgaactaagaaaatccaaaggaaacaaagtgacttgggaagatatgaaaacattccttggtgaagaaatgggcttttggaaacaattccctatttcttgggagcaagaaaagaagttacgcgacgaatttgagaagtcattcatcaaaaacaaagtagtatttgctgaaagtatgtattccaaaagtgaaccaatggctgcatgtgccaaagaagtaatggacgaaatctccatggtaggctgggtaagcggcggccattcagcaggttttgttcctgtattcgctatcggggcaggttctcacttgttcagtgaaaaaatagacaatacggagattcccaaaagaattgctaaagcggcagggtacaaataagatattaaataataagtattaagtattagtttgtgctataactgcatagaattaatgcttaatacttattatttatttctaagcttgtgtctctccttctatataatcttcaaggaaaaggttttcgccgtcgaatactgcatatgaaaaataattaatccagtccccaagaatcaacacgcgtgaagtggtactcaacatcagatccagttcaatgtgacgatgaccataaataaagaagttgatattaggatgacttttcagatactccttcgtatatagtaccagatgttcctggttttctcccatataatccggttcctttccgtcagcccgtttctgtcggctgtgttttgcccatgtcaatcccaattccacactccaacgaggatgaagggcggaaaatagggtctgcaatgttttgctgtgaaacatggaacgaagtaatttgaactttttatccgggtcaccaagtccgtcaccatgagcaagatagaactcttttccatagatctcagtagtcaatggttcacggtgcataatgacaccacactctttggtaagataatctccgcaccaaatatcatggttaccggtaaagaaatgtacttctactcccatatccgtcagctcggaaattttccccaggaaacgggtgtaacccttaggtacgaccaaccggaattcataccagaagtcgaacatatctcccagcagataaacggcagctgccttgtgctttatactatcaagaaaattcaccaaacgccgttcctgtgtacgcccatgttcaatagcacgggaaccaagatgtgcatcggaaaggaaatagacattcttcataaaaaacccagttccagtttagcctcctcactcatcatatccttatcccattccggttcaaacaccagattaatggtagccgagttcactccttccacagattctatcttctggcgaatatcttccatgataaaatcagcggccggacagttcggtgctgtcagtgtcatatccagcaccacttccccattatcagagacatctatcttatagatcagcccaagatcgtatacattcaccgggatttccggatcgtacacagtttttagcatggctacaatcttttcttctatttcaaacttttccatacgttcttatttatgtattgcaaagatagagataaaaaattagacacggaatgcgtacctaactaaaaaacataccgagagactaaattgttgcgggaaatattcatcaatcgtttcagagcagcccttcatctgcaaagctgtaaaagccgtcctcacagactatgacatggtctaccaagcgaatattcatcgtatccgccgctttacggatatgttccgtcaatgtcctgtcaggctggctaggctgaatatttccggaagggtgattgtgcaccacagctatttgtgtagccctttgcatcaatgcttcccgaagaatggaacgcacatcggcataagtaccgtctataccgccggaactgatacgtatcttatcaatcagtttcgttgcctgattcaacaacagtacccagaactcttcttgcgccaggtcgcacattagtggttgaaaaatctcgtagatatcttttgagcaggtgatccgaagtctctctctgatgttttgcaatttccgccgcttacctaattcaagggcggccataaccgtaatgctctttgccggtcccattcctttaaaacgggaatagtcgcacacttcccacttcgccaaagcattcaggttattatcacaggacaaaagcaggcgtcgcatcagttcgacagcgctttcttccgtattcccggagcctattaatatagcgagtagttcggcgtcactcaatgcggctgctcccttctctatcattttctcccgcggacgatcctccggtgcccattggttgatagataacttgtgtttgttttccattttctatgttttgaaagtgtaaaggtagacttattttatttaatggcaggggatatagaaaagaaaataaaataccggtggtatttccctataggaaactgaaagtttcaagccttgggaactttagtttcaagcgtctgaaactaaagtttctctacggcgaaaccaaaggttccaatgcatgaaactattggttttgccgtattaatttatagtcatataagtatcctagttcataaccgtgaagacacaattcagaatcatacgagtttacttataaaagttcttttgaaatgcttcaaactcatcttttcctctgatgcaacgttgccaccatgcacgccagaaacctgtaccatagcctataagctgaataaatgcggcagcaatggaatatattccgatacttaaactcttattttgaatcgtcgagtctatgcagaccaacagtacataaagaagaataggcgtgaaactaaacagacaaaacggtgtccccaataataaaacagctactcctaatgtaaagaccgccgggagcagatgcaccagtttcaacgaatcagggtacttcttgtaaagattgatacgggcaataccggagttgtgcacttgtttgaagaatttcttcaagtctgtccggcgcttgtgatatacccaggcatccggaaaaaggcgacaggtataaccacctttaaaaatacggatgctgaaatcaatatcctcgccgaaacgcatctttgagaatcctcccaaggtttcatacaccgtccgacgtacccccatattgaaactacggggatagaatttatccattttcttttttccgccacgaatacctcccgttgtgaaaaaagaagtcatggaataattaatcgctttctggatatccgtaaaggaatcgtgtgcgcggtcgggacctccaaaagcatcggcaggagaagcgagaagttccgcctcgatggcatcgaaatatctctcggggagaatcacatcagaatccagtataataaggtattcaccctcgctgcgttccgctccgtagttacgtgtttgccctggtcctgaatttggcttagagaaatatttgatattcaaccggtcaatatagcggtctgttacttctttgcagggaatggaagaaccgtcttccactacaacaacttcaaaatctttaaagtactgtgccgtgagactttgtaatagttcatccacttcatcgggacgattgtaaacggggattatgacagagtaacgcatagtaaaatactggatataactgtttgatatgcaaagtaaaggaaaaaaaatgagactgatacaggaatgataaatttctattcattaaaaaaggcgacacttttatagagccgccttatcatatatacaaaagtatgtttattacttattcagaatatccattgtatccgaagcaatcagcaattcttcatctgtcggaatcactaccacttttaccttagaagcaggagtagaaatgactgcttcctcaccgcgaaccttagcattcacgtcattatcaagttcgatacccatgaattccatgtctttacaaacttcacgacgacattccatctggttctcacctacaccacctgtaaacaagatgatatccacaccacctaatgcagcagcataagcaccaatgtatttcttgatacgataatagtacatcttctcagccagaattgctttttcattaccggcagcacaagcagccaataattcacgcatatcgcttgatactccggaaatacccaatacaccgctcttcttattcagcaaattagaaactcctgttgtattcaagccttccttttccatgataaatgtcactgcaccggcgtcaatatcaccactacgagttcccatcatcaaaccttccaatggagtcagtcccattgtagtatcaatacatttaccgtctttgatagcagcaatagagccgccattaccgatgtggcaagtgataattttctttccttccggattcacacccagaaattcacacacacgttttgatacataacggtgagaagttccgtggaagccataacgacgtacaccatatttctcgtacaattcgtaagggatagcatacatgtaagcataatccggcatagtctggtggaaagctgtgtcaaatacgcctacctgcggaatattaggaagaatagcggaaactgcgtttactcctttcaagttggcaggattgtgaagtggagccaagtcgttacaagcagtaaatgcttccaatacctctttattcagcaatacagattcgctgaaacgttctcccccgtgtaccatacgatgacctacggcattgatttcatccaatgacttgatagctccatattcagggctaatcaatgtattcaggataaactccacacccactgtatgctccggaatatctttttccaggattttcttttcaccattcggcaaagtcaatttcaggaatgaacccttcagaccgattttttcaataccaccttgagcaattacctctttggtggtcatgtcgaacaatttgtatttaatagatgaactaccacagttcaatactaaaatcttcatatcgttttattatttaatatccgttatttatttgttagcttttgctgcaatagcttgattagcagtgatagcaatcatacggtaaacgtcttcgatagagcaaccgcgtgacaggtcgttcaccgggcaagcaattccctggagaatcgggccgatagcgtcagcatgtcccaaacgttgtaccagtttataagaaatatttcctacttccaagctcggaacaatcagaacgtttgcctgtccggctacgtctgaacccggagccttacttgcacccacttcaggaacaagagcagcatctgcctgcatttcaccatccaagtcgagagtcggagccatttctttagcgatcttcgtagcttccacgactttgtctaccacttcatgttttgcagaacccttcgtagagaagctcaacagggcaactttcggattttcgatacctgccacagctttagctgtttgagctgtgcacacagcaatctgagctaactggttagcatccggtaccggagtaacagcaacatcgcccattaccaaaattccattctttccatattcaggagcgtgagttagcaacaacattgcacctgatacacaagtgattccgggcgctgtcttgataatctgcaaagcaggacgcaatacattaccagtagtgttgcgtgcaccagccaactggccatcagcatcaccgctcttaatcattaaacaaccatagaacaaaggatcattcgtcaacttacgagcttcttcaatagtcattcctttttttttacgaagttcacacagcaattgtgcatattcttcgtgtttcggagaagtctcaggatcaataatagtagctttaccaatgttgcccaatccccattttacagcaagttcgatgatttctgccggtttacccagtagaataaggtcagcaacttcatctgtcaaaatctgattggcagcttttaatgtgcgttcttcagttccttcaggaagaacaatacgctggcggtttgctttcgcacgcgccacgatttggttgattaaattgagcatagaaatattgaataatgttataaaacctggttacaatttataatttgcggtgcaaaagtactcaattttgtaatatacacattacaaatccgcccatttttcgaacccaagtctaaaatattataatatttaacactgtacttctattttttctacctttgcagcgttttcaaacaaatcaataggtaattagtatgatacgtcagtgcgccattttatttggctgtttggctttgggtgaattaatagtttatcttacaggcatcaaacttccctccagcatcataggcatgctgctgctcaccctttttttgaaattaggttggattaaactacactgggtgcagggcttatccgactttctggtagctaacttaggtttctttttcgttccgcccggagtggcgcttatgctatattttgatgtaattgctgccgaattctggccgatagtgatagcaacaattgtcagtaccgcccttgtgctagtcgttacgggttgggtacaccagattgttcgtaagttcaggctggcgcgccaaataaaactggcgcgtaaacttcatttaccggatctccatctatcggacagacttcgtttaaaagataaaatcaacttaatgaataaagacaaatgagctttttagaaaatgactttttcctgttagctgtcactttcgggattttcttcttcgccaaactactccagaagaaaacaggactggtattgctaaacccgatattacttacaatcgcagtgcttattatttttcttaaaatgacacatatctcttatgagacttacaacaaaggcggacatcttatcgaattttggttacgtccggcagttgtagctttaggtgtgcccttatatcttcagttggaaatgataaagaaacaacttttaccgattcttctgtcccaactggcaggatgtattgtcggagttatttcagtagtgctgatagccaaactcatgggagcttcgcaggaggttattctttcactggctccaaaatccgtcactacgccgattgccatggaagtaaccaaagctatcggaggtattccgtcactcactgcggctgtcgtggttgcagtaggcttactaggcgctatttgcggttttaaaacgatgaaaatcatgcatgtaggtagcccgatagcacaaggtctctcaatgggaacggctgcacatgcggtcggaacctccactgcaatggatatcagtagtaaatatggagcgtatgccagcttgggcctaaccttgaatggaatattcacagcattactgacacctactatccttcgattattgggtgttttgtaaaaacaaaaatccacaatttttcgttatataagagttaaacgcaaaaaacaatcacatgatttcatttaaagatatcacattagcagataaagacacgattacctcattcacaatgaaaagtgatcgccgtaactgcgatctttctttttccaacctttgcagttggagatttttatacgatactaaatttgcagtagtcgacaatttcctggtgttcaaattctgggcgggagagcaacttgcctatatgatgccaattggaaccggtgatttaaaagctatattacgcaaactgatagaagatgcagataaagagaagcagtctttctgtatgttaggagtttgcagtaatatgcgtgtagatcttgaaacaactcttcccagccagtttgttttcacggaagatcgtgattatgctgattatatttatttgaaaagtgatctttctacattaaaaggaaagaaattccagtcaaaaagaaatcacatcaaccgtttccgcaatacatatccggattatgaatacacaccgattactcccgatcgtattcaggaatgcttggatttagaagcggaatggtgtaaagtgaataactgcgatcagcaggaaggaacaggtaatgaacgccgagctcttatttatgcactccataactttgaagcccttgggctgaccggaggcattcttcatgtcaatagcaaaatcgttgcatttactttcggtatgcctatcaatcatgagacgttcggtgtacatgtagagaaagcggacaccaacattgaaggagcgtatgccatgattaattatgaatttgccaaccgaattcccgaacaatatatctatataaacagagaagaagatttgggcatcgaaggtttacgcaaagccaaactatcttatcagccggtgacaattttggaaaaatatatggcttgcctccaagatcatccgatgaatatggttaaatggtaagagacaacctatggtgtatcagattcagtatgttataacaacaaaatcctaattgtcacaacacacagaatctgatataacttattaatcagccataatctttatatccggtgacggaatccgataccaatattctactcccggttcttctcttcccgggattttaaatgtcaacttaattaagttatcatgcaagcgttcaacactgatttcgttttcaacacctgcggggaaaactgagtaaacagattttgtaatgttctccacatagatactatccgactttaattcatattcgccctgaaccagaattaccgaacccattttattagtatcaataatgatattcatgaatgtattatcgaccgagataaatttcaacaatgggcctagtgacaatctgtaacccttttcgaccgattctaccatacatgtctgccataccccttgcattctcttattctttatctcctgtccattgggtatcacaagtttgaacgggacattttttgaactatttttttgtagactgaacataatgggaaccgtgaatttcaccttgactgtcttgccgtctactattcccggagtccatttaggcatttcttttaccacacgtaaagcctcttcatccaataaagggtcaacacctcttattacctttgcctgacttagtgttccatcttccataactacaaactgaacaataacacgccctgagatagcatttttctgtgcttccaccggatatttgacgttcgaagacaagaacttcatcatggccggaacgccacccggatactccggcattttatcaggaatcaggtaaacgccatttacatccaccttctgtatcggttgctcctgtgcaactaatagtgaacaagcaaataaagagataatcagactaagtagttttgttttcataatatattaatttaagagttagaacagcaaatcaattatgcaataatacctaaaaaagaatgaaatcacaaacattattgaacatttctactctcctcatacgtttttaaggtacctttgcagaaataacgaaaaaaaacctaagcatacaatgaaagaaaaagtaaaagcattatggaagttgtgtttcgacgatagtgatcagttcatcgatatgtacttcagactacggtataagagtgaaataaatgttgttattgaaagcgggaacgaagtgatttccgcccttcaaatgcttccttaccccatgagtttttgcgggaaacaggtagctacttcttatatatccggcgcctgcactcatccggactttcggaacagaggagtaatgcgtcagcttttatcacaagcttttgcccgaatgctaccgaacgggatcttcttcagtacactgataccggcaaatccgtggctattcgattattatgcacgcataggatatgctccggtgtttcaatattctacgaaagaaatcattcttccggagtttattccttccaaagaaataaaggttgatatcgtgtccgaatataaggaagaagtatattcctatttgaataagaaacttgcggaacgcccttgttgcatccagcatacaacagaagattttgaggtaattatggctgatctcgctatcagtaatggtattttgctcgtagccaaattaaataacgaaataaacggaatagcgattgtgtataaaagagacgaaagcgtcattatcaacgaacttctcgtagaaactaaagacgctgaacatagtttattgtttcatctcaaacaacataccggatgtaatcgtatgattcaattattacctcctgacaaaaagcggcctcaacaagcattaggaatggcacgcatcatcaatgcaaaagaagttctacaattatacgctgccactttcccggaagatgaaatgcagatagaggtatcagacaagcagttatctgtaaataatggttattactacttatgcaaaggaaaatgtatgtatagcaccgaacgtttgcccggtgcacacatacaaatgaatatcactgaattaactaacagaatcctccaaccgttaaatccctatatgagccttatgctgaattaaaagcatctattttatttattcagataacgtacccgttcacaagctgccaacagaaatgctcccactccaaaattggaagtagaattagcatctactacttgtcccggtatagccttttcgccgataggctgtacataaccgattttcccatcaggttgaagggcaactgttatcaaatattgccatgctttttcaactatcggctgatattcgccggcattcaggaaaccgttattaattccccattgcagaccataagcaaagaaagctgttccgctggtttccggtcccggtgcatgttgcggatcaagcatactgcgtgtccaataaccttccggttgctgacaagcagcaacagatttagccaatgtacggaaacggtctatatattcctggcgatatttatccgttttaggcaagtctttcagcacctttgccagtccggctaatacccaaccgtcaccgcgtgcccaaaaatcttttttaccgttcacacttttatgcttcggatatacgtattttccatcccgataataaagtccggcttcttcgtcgtacataatactatcggcataaacgagatattcatgcaatttctccaggtaaagtggattcttggtgatattatacatctttgtcatcaccggcattaccatatacagtccatcggcccaccaccaataatcacggttaggtgtactcatctgatactccattacttcgcgggcacgggctattttttgtgtatctggctccaaattatataaatcagcataggtttgaaaacaaatctgataatctccgaaaagtacatagtcgtcactttctccatagctgtatttccagcaggttttatcgtccgacttagctcctttccattgattatgctcagcccactctttcgaatattccagatattccggtttctttgtcaagaaataaacttccatattcccggtatgataggcggcattatcccagaaggaccgaccatgttccggatgattcatctgccaatagccattcactttatgaatcatctctatcacttctcccgaagaaccggttttcttttccgcacaacctgtacatattgtacttcccaaaaggaaagccgaaaaaagagttacatataaattcttcatatttttatttttttgtattcatatccatttccaacacatataccatttgaggttcaatctcggccatacgttcgccgtccccctgacgagtgtgttgtacaaagagatgtagtttccgttgtttcttccaaagctccgtatcatgtgaaggttcccaggcatccaccgagaaatctgttagatccgttatcgtccattgactgatagcaagatcagtagcgtgagctattgaaacacaacttccccgttcttcgtcacgaaagatgtagaaaacttcccctccccctacaacaatacgcggacgagcaataggaatcattttcgtaccgccgcctttcaacgtgaaaggtgttttccgatcggttacctgacgatgatgccataccttcccatcattccagacaatgcgatattgaggtatattactgtcagggtccctccaataagtagctatataaggatttcctccagcatcggcactcatactggtctgattgattaactcactattttggggtagccgacaagcgtattccgcattcgacaacttaatcggaagttcgtattgttctccgcttgatttataccatgtcacaccattatcaaatgaacgggcataacagatatcgtggtttgtctccacttgccaagtttcacgccatacccaggaaaggtgaatcgttccttgctcgtcaacatatagctgccaataagcattccgcttattttctccgtctattaagacatcttgaacacggctccacttatgttctttcaatgaataacggttcattaccaaattaccacgtccggaagaaccggaacggtaaacaaacaataaatctccaccggacaaagagtaaaattccggataagtaacattgccttcatctactccggtcattggcattttctctcccaattccaaagaagcgggagcaatgctccggcagtaattcagtttatgcccgtgatgatcaaacgaaatatgcaaatacccttctccatctattatcatactgatgatattatgagcatctttcacatttccacgatattgtgtacggtgcaatgtccacagttccgaattcagtttacgttttcccaatacaagataaccttcagcatcataatagctgatatactgctcatcaccgtgagttatcagggagttgttacggaataccgtagtattgaccgaagtacaactatatcccttccccacttcaaccaaatgttgagggtaacatagtacaggaataaacatgattccgcaaagtagtagcaatattcgcctcatgttcattcttcttttttatttatcaaaaatagaaaagtcccatttctcatgccagggaattgtaattttcccgtcttttatcaatacaggcaaccagacatagcgagaatcctccaaatctttctttttccaacggtcaaacatagcgatgtatgcatccttcttgccaataacaggctgaacgtatgtgctttgtgcatagaatgtcttgtccgcatccggccccgtgcaaggattaccgattgttttccacgtacccatgatagaatccgcaaccgcaatctccgctacattcggatcccagcctgtacaaccggaactcaacatatagtatttaccatcatatttaaagacagcaggagcttcacgggattctttcacaaaattacgtgtaaaacgtccgctcggtttcagatagtcgtcagtcagcaagctgatatacattgtagcattgttctccgaagagtagaattgataagcacggccatcatcatccacaaaaacggtctggtcgcgactcatcgcattgttagggcggaaacttccctgataaataaatggcccgacaggagaatcggaaacagcaactccggcacaagccttgctgtaatcggcactttccacatgtgcccacatcacaaatttacctgtctttttattataaaccacttttgggcgttccaagactttggacggatgcagatcgtgatccgggtcatttttaacagccggaagcacaataccttcaaatttccagttcagtaagtccttggaagagtagcaacctactccagtcacatccgtacgataacattcccacgtagcccattcgggcagaacggtttttcctttcttatattcaccataccaatagtaagtgccattgtgataaagaagcccgccaccatgagcattgatcggatttccatccgtatctttccatacttcgccgggaataaactccgtattctcctgagcctgtaccgccacaggtaataagcctacgcaaattacaaatagtaataatagtttagccatatatcaatctctgttagttagtttattttaatgaaaagcatgatctttcggaaagtcctttccttcccaagcctttttactggtccaatcttcagcaggagatgtccagaatgtatggtcggcgggaagtccgagcggcaggaaagcaagtgatgccatatatagactgccattgttcgtataccagtcggaaatattcggctgcttgccattgaatcctaaagttaaaaatcccttttcattgaagttacggtcatcaccaaacattcttttaataactgccgtcatagctgcacgaacttgtccatccggtaattccttgggcagccatcctctccatgccaataaagctaaaggctgcaaagttcctgtacgataagtgatagaacgaccgaaaaccggaagcgccccttccggagagataaaccgttccaaaatcattccgaaacgctgcatccgtttctttgcacggttatagtcacaatccggtgcgttccaaatcttacttttaccagcatttgtcatgatttccaaaggttctatatacatcggatgcaaaacaaaactattataatagtcaaaagcaaaacccggaccatcggagtaccaaccatcgcctacgtaccactcttctactttacgcaaagcggaaactatgcggtaagtatcacttggagcgcctgctttacgcaagaatgcttcgaccgtagcagaaaacaacaaccaatttgtgtaaggtggatctactcggcgaagttgtgtaaactcagctatataacgttgtttcgtaacactatctaaaggaatccataaagcatcatagcctcttataaaactctctgcaatataggctgcgtcaaccaacgtttgcccttcttttctccacaaaagataatcgggactttcggggtcaacagcctgtacgtaacttttcaaagcccattcacgcaattgttttcgttgaatgccttctgccgtatcatcgtccggcaaagaaatccaaggagctaacccagccattaatcgaccaaagcactccatataggttactttcttgtttcgcccatcccatgtaggactgacttctaccagcatattctgttgcagcttcccttcactcagattactaagtaccggagcagccattcggtacaacacccccgcccataattcacggtcagtcggttcctttacttgtttcttcttttttgccaataagtcctgtgacggaatcagcaagattgcgatcagcaatagtaatgtacaatgtttattcaatctcatgatattatttaggattttcgtacgcaaagatactttatactcataagagtaaggttcaattttatatcaaaaaagggatacaaaacaaccatttttcatacaaaagctgtaatatatgcgagtttaattaggtttccacctatccacccattctataaaaggtattcctttctcatcaaaccggacaggtagccaaatgtaacgagagtcagccaaactttccggcctccaactatctgccataaaaataaattgtttttcagtcccttgcaaagggagcacatacgtgctctgccctccgaaagttttatccgcattctctccgacacaaggatttggtagttgtttccattcccctaaaatcgaagtagcagtcaacaaacgagctttattaggttcccaacccgtacagccggaagttatcatccagtagattccgtcttttttaaaaatagcaggagcttcattatgtccacctggaaaaatacgtatatacttgcctgtatgactaagataatcatcagacaattctgcaatctgcaatgtcaaattgtcttccgaagaataaatatgataagcttttccatcatcatccacaaacaaagtcatatcacgggacatttgtcctccttccaaatctcttttcacaaacattcccttttcaactgcatcataccattccggagtccaccatttttcatattctgaaagattccatttgatccgtttctctttcttcgtcatattcaatggatagatactcgaatttacacgagccgaacgaataaaacaataaggtccagttggtgagtcactgacagcgacggcagcacgggccggtccatacccccggcctttcaattccagatgaaaccacattacgaattttccggtctgcttattataaataactttcgggcgttccatgatgcaccctttttcaatatcacttccttttgcttcagatatgggtaacaccactccttcatagttccagttcaacaaatcagtagatgaataacaattgatccctttttcggtcacaaagcccgaatcggggcgatgttcaccgaaccaataatattttccttcatgatacaaaacgcctccaccatgagcattaatcacatttccctccgtatctctccaaaccttaccagaaacaatttttttctctttctgataaacccgcacataatctatttcatacttcatcggcaaagcactctcatcaatcggaccaccattgataccaccaatagccaaattcaacaaaagatattgcggtttcgtaaaaggattcgtcctcttgccgatacttccgtttacagtatcctttaaaggaatctcattcaacagttcatcatccaaatagagtttgataacttcttcatcccaatccatccgccaaatgtgaaatttggaagcccattccggatctttctccgtaaaatggatatagggtgtggccttactattccatttagccccccattgcttgtccgtgccccacgcagcatttgccaaaatatgaggaactcctttgatttggtaatattccataatatctatctctccacatgaaggccactccatattactacccaatgtccagatagccggccatgcacctttcgccaccggtatgcgggcacgtacttcaaaacgcccatagagaaactccttttttccggcagtcgtcaccgatgaagaagtatattctataaattcccgttctttacgccaatcgttactaccgggtatgtaaagaggattctgacgattccgctctttccgagcttcgatgacaaggaagcctcctttacaaactgcattgtccggctgataccattgagcctcctcattgcggacataaccctgttcatagttccatacggaaggggataatctcccctccgtattaaactcatcgctccagaccagcctccaatcgtcattccgcgcagttgcgagcaaaggcaaggtcgtcagtaacagcaatataactgaataatttttcaaatataccattgcttaatcctatcgtttattcaaactgataaacacgaacataatccacatgatattcaagcgggaacttagacaagtccggttcacctccattggatcccaaagccagattcaaccagatacattgtccgaatccttcatcattctctttacccgcgttattaccttcatcaagatatggattacgatatgatcctctccaccaatcatccagtccaccagatccatttcctgtagtcgctttcaaatccttaatttcattcatcaattcgtcatccaaataaagtctcaaggtattctcgtcctcatccaggcaccagtccatacgccaaatatgatacttcttcccccaatctttatctttcgctataaattcagcaaccggcctgttataagactgccatttgccgttccaacgggtgtccgatccccaacaaacattggcgtgtacgctcggctttccatttaccagataatattcaagcaaatcaatttcgcctcccagcggccattcccagcaccaactgtcagtgcttccaccagtcgtccagatagccggccatgctcccattgccgtaggaatcttggctctgacgagcattcgtcctttccggaatctataatcttttgtaatcaggcagctcgaagtatactcagcatattcacgattctttttccagtcgctacttccagcttcataattcgtattttttacccgttcctcttttcctgtaattatcaatgccccgtctttacaaatagcattttctttctgataccattgcaattcctgattacgttggaagccttcttcccaacgccatacattccagtccggctctcccgttccattaaattcatcatgaaacttcaaaaccagtccttcttccgtcgtttccggtgcatcattgggatcaggcacatattccggtcctttttcatcttcagccgattctacataggtcacattgaaaagtaacatcaacgtatttgttttagaattaattccataagaggatgagccctcaatcgctaacggaagtacatacaacaaattcctctccgcttcctggcaagctgcaaccagttcactagaatagactgttactgatacggcatccgattttgtttcaccagcttgtagcgttaatgtctgagaagataaatgataataggactctggaagtaattccgcaccgtcatattttgcataaatgcctccttccgccaccttagctagcactttattcaatgtatctttattcacaaccaagctaactttagcttcttgtccggctgtgcgtccttgataaagagacaagctcaacttataagtaaagtttttaacaggcgtttcatcctcactttgccgtaaatccgtagtcacgttacattccgcaccatcccacacttcacgggcttgcgtcagattcaacaaattcagatctagttgaccttcataactaaaatctttatcatcgtcacagccatatactccaccgatgagggtggccgccatacaggcgaccatccatattttattcattttcatcataagtctcattttaaattaatccaaaggaactgtttccgggtcatacttttcaatatccgcatcaaaaaaggcaatctcccctatatgaaaatatttcttgttcaacgaacttgtcaatacattgaaacggaaatatttaaacttcttacccggcattacaaaatcagaagcgtattttgtctgacgtgttgtgggcaatccactcaaagtagaaacagtttcccaatgttcaccatccgtactaatctgtaattccgcagaagtagggaatccgtccgtgttacctgtatcccgcgtataatactcgaatgcaaaattttcatgttcttcctttaaatcgatctgtatataatgcggcaggtcaacttgcggagaatgccagttggtgtgaaaaaaagagggatccgccgttttaccatctatcaaacggtcaaaatacccttcagacgcgtccggataattacaagataattggtctactatcagactgacctgtgtacgggatttctccgtatacgatgccggcatcgctcccgaccgtgctttcaattcctgaaccgctcctgcttcatgagccgcattaaaggtctgcaaataaaaagtatagtctccgaaacgagcacgagtattttctatcaacatttccgttgttcctttagaagcaatcttacagatatttttcttttgtaaagggtcataatagcgaatctgcatataagcgtaatctccttccggtgctttccaagtcagtttaatctgtcccggcaaagcctccgacacgaccgtagaaagttcaacggcagcgggacttcctccccccgatgtttcaaattcttcaaaattcttatcacagccaaccagtcctaaaagcgcaaaggctgcaatcatatatttaacattcaacttcatagcttttatcttttatcattaataaaacttaccaacccggattctggctcagattcggattcttacgcatttccgaagccggaatcggaaagaaatacattttatcatcccaaaccaatgatttatttgtccgctcatagaggaagtttccatcctctttttgggtaatctgcatacgcccgattttagtgaagccaccttctttccaacggcgaacatcccagaaacgatgttgttcaaaagccaattctaccattctttcttttttatatcgttcccaaaattcagtgttagaaatattatccgggaaatccggcatttgcacatccgaacgctgacgcaccttattgattgcggcacaagcagacatcctgaattcgttgtcagtagcaccggccgctcccaaataacggtagattgcctctgcataattcagataaaattctcccaaacggaaaacaacccagttatgccgtttgcctccactgccactctccgcactgatgtcggtagacgcatccaaatacttcttcaaataataaccggtcggtgttgcataaggaagaggcagaccattcttaccgccaataaatgtttccaacggattcggattcgtattcggccatttgtcaccattacatgcgatagtcatgccgaaacgcggatctttatctccattatccttagattcgtaagcatccaccaatgtttgtgtcgggcaattaccggaactggcattctccataccaaccgggaaattagtatattccggactacttgtatctccaatacgacgaacgaaaatcatttcagaagcttgataattatccgtaccccaaatatccgtatattttccaagccggataccgttagccgtacaataatcaataacagctttattggccacagcagcttcacgccataaattccggtcttcaccaccactgaacagtttgcttgctctatataatgcggcacgggcttttaatgccaaagcagttccctgcgtgacacgaccggcctccgggttggaaccacccgcagcatcattatccaaagcggaataagaaacgggcaactcaggcgccacttcctcacattcactaataataaaatcaaagacttccgacgccggagtacgtgaaagagaattagcttctttctctgtcaacacattcaccgtaaaaggcacatccccatacgcacgcaccaacaagaaatagtaatacgcacgtagcagacgaacttcatactgataacgattaaaccggttcatctgagcctcataatcctgcgcatagcgtaaatcataaaaatcaaggtctttactttcttccagaaagtaattagcggcacgaatacccgaataatacccccacagagatttagggttcaatgcactccaagcaccatttgtatagtcgagaacagatgaataagtaacagccatttctgcttcatcacaagcggaagccaatgactgatagcttggcaagtcggaatccagataactatagatattattcacaaatcctgccgtacgggaaaaatccgaaaagacataatccttgtcgtatgacgtgtattcatgataatccatcttatcgttgcaagctgacaccaccgctatacaagctattcctaggcatatatttttcaatttcatagtttctttctttttatagcgttaaacgttaaaatcctactgacaaaccaacatgaatagatcgggtagcaggataagagttattcatcgcttccggatccaattggtcaatactatcgaagcaaagtaaatcaacccctcttacatatactttcgcattctttacccaaaacctgttcaaccaggatgaaggaagcttgtagtacacctcacaattacgcaacttcaaaaaagaacgatctgccaaccataaagagcttgtctgcagattgttgtcaacagtttccgtcgtcaaccttgggaaacgagcgttcggagtttccggtgtccaacgattccggtaaacataattagaaattgtcgtattatccaccaatggatgatagtaagttcccgacaagattgccgtataatttcccactccttggaattgtgcactaaaacctaatcccttccattccaaaccaagactgaacgaataataaatctcaggacatgtactattgtatcccatagctactctatcatccgaattaattactttatcaccattcatgtccttgtatttaatatctccggcctttaccggtccaaactgctgtggcaagctattatctatatctgcctgatctacaaaatatccaatagcctgcaatccaaagatttgtcctaccggattgcccgtagagcgcgtatagtcgtaagctgccggttcttctagcatttctataattttacttcgattgtaagtgaacgttcctcctagatttaattccacattacccatcttcttatagtaattggcgccgatttccgtgccccaactatctacgatacccgcatttacataagaaccggatgcacccaacaccgccgagttctgtccgtctgaactgacccaaatatcagaacgtctttcataaaagccatccactgtcaaagtcaatcccttgaacaaggtagcatccacacccgcattatacttataagctttttctgtggttccgttaacagatgccagacgaccttcatgccagcctccgtcaccaccgaaattattatttatcggatagccattaccgccacctaccgtctcattccaatagccgttaccgggaatattatccgtattcaacataccgaaggaagcccgcagtttcaggaaatccaccacattctggctttgcataaacttctcattagaaataagccatgccagcccaactgtaggagatacattccagcgatgatcgggcgccaataagttggaggcagaagccatcaatgtaaaatctgcaaaataacggttcttaaagccataatgagtataccaacccgcattctgacggtagaacgtattattgattcctttagcattatcatatttataggtataaagcaacatggaatacagactgtgtacaccaaactgacgttgccaatcgacattcatttggaagttaaaggcgcgatattgccagtcaagtttgctgtcacccgacatttccgtatcttttcctcccgttatttcctcaccagctatcggcaatccgttttcccaggaagcgaccgatgccataccatatttatatccttttgtgtgattctcccagtaagaagcgagattgtcatatcctatacggacagaagctcctaaccccttggttaaagaagacaaatcctgccgtaaagacatatcagcatataatccacgagtatgtccttttgagtatgcgcgcccttcagtcaacgctaccggattccagttctcaccccaagtagtatttcctccccacaaaccactttccgtacggatagggaaagccgctgaaggtaattgatacagtttgcttatcaaattatcgctgcccatacccggacgactgaattcattcaaaatccccatgatattggcctgcatctttgttttcggtgacaaatcaatatccagattggtacggaagttagcttttgaatacttttcctgagtggaatagtcagcattcgtatcgaagtttttgataaatccacggttattctgcaaattcatcattgtataataacgcatcttggtagatccgccgcgaaaacttaatgttgcgatatctgacgccccacgatcacgaaaaacttcttcccaccagtttacattcggataaagataaggagaagtgccattcttaaacgcattcaattcattttgcgaatatcgcacctgcttgccatcatttgtcaatgcttcatttaaggcagaagcatacgtataggcatccgccaattccggcttgcgcgtcatataattgaaagcatggtcataagaaaaattaatctcacgagtatcgtatttaccacgttttgtcacaatattgactacgccattcactcccctatagccatagagagccaacgcggccgcatcacgaagtacactaacagattccacttcttccggagtaatatattttaaagcctgccagttattatcccgttcaagtccgtccacgaccaacaagatgccattattaccattcagtgtcttcaggccgcgaatatacatcgacggcatctgctcccataccacaccggtactttgcatggtagtcagtcccagcacattgccatataatgaatttccgattgaaaaagccgagcttttatctatattctctgcatatacagtagatacggcaccagtagactccgcattcgtttgctgcaatccaaatccgtaatttactttctctgaagagtaatccatggcaaccgtcaattccgaaccgttttctattttcaccaccttcattgcatcatcaccagtctgtactttcaaacggcttcctttcacagcagtgatttcaaaacgtccatttttatctgtagccacccgcaccaatgggttctcttcaaccgaaaccaaggctcccgctaccggcttccctttttcatcaagaactcttccggttacattatcttcactttgtgcccagccgttcaaggtgacgcaagcgaatatcgctaaagctagtatcttatattttttcattttattctatgattaatcgtagttattccacattaattccaaccaggattttgagtcaatccgtatttcttgttcacctctgatggtgggaatgctgacaaataccacttcggactaaaattactccaccatgcacgggaaggattcactagcggaaacgcttcatgagtgaatttcgttggtttaggataaatactgctgtttccggtacttccggaccaaggcgtatttcctcccccatcatttctataaatcttcaatccatggagttgttttctaaaaagatcttctcttttatatcgtgtcatgtcaaacagacgtacatcttccaagcctaattcgcaagcacgttctctgaggatctcttccagcaaggcatcagcgtcagtcgtcagattcttgccgggattgcaaaccgccaagtctcctaaaccaacacgggcacgtactttatttacttgctcaatagcacctggcagatcattcttcgatttaagcaaagcctccgcataaatcagatacatttctgccagacgcagatatggccattgcagatatttatctttcagagaattgacaccttccttatagaacttgtaacatccgaatccggtagcatatttgcctgtctctttctctgtatcattaatattgtcacgtcctccaatccataattcggcagcatgatctccaaactgtgttccattcaccagcatcgtttcatacaaccgtgggtcacgaatcggtttgttgtaatcattatccgtataaaacaggtctgtagcagtattcaactggaaaggttcgccattactcattggaaacatctccataaattccagtgtgggggtcaatccacccgtaataactgtaccatttccgctattgacaaaaatatactgccattcatcccatgaattaaatttaccgaaacgggaaatatgcgtagaaatcaacagttctttattattctcacgggtaaaataggccttattatacgcatctctgtaaccttttgccgtagcttccgttgcctgtgtcagttcataataccctcttgattgaagttctgtaaagaaatcaacacaagcctgcaaacactggtcccataactccggtttgtaagcaccataccacacctgatgattagtcacagcatcttgcggcggctccgtacaataggggacattgtcattaaacaatgggctggctgcaaacaaaagaatcttacacttgagccccatagcagctgctttggtaaagcgtccttgccaattcgtgtcatccgtacctaagtcccacggaagttgaggagtagcagcagcctcatctaaaagattaatcatgtaattcaccgtttcttccaccgtagcgcgaggcaattcataagaaggctgcacgtcataggtttcctttattaacggaagccctccaaagtggcgaaacaaatcaaaataacgagatgctacaatcactttagcttctgccgccaaacgttttttctccgcatcttccatatccggaacccgctctacattctccacaaaaagtaatgcagcacgaatcgcctcccaacaattctctttagtataaccaaagcgcgtatcatcgctactatcctcatcacctgccttataagagcctgaatagtatttccggttaattccattccaatccgtgtggctatgccagcaatcggacatcatttcaaagattcctgtgttcattttcccctccaccgtattccaatatacagggagcgcgtaataaagtttactataagtattccacaggaaagcacgagcgtacgtagcttttccgaagattgtatcttgcgttaccgctacccccggagccttttctaaaaagctatctccaaatttcacttgatcgacacaagaagaggaaaacaaagctactcctgccaatgtcgctataaaccatttacttaaatgtttcatcatattattcataaagtattagaatccaagtttcaatccaatattaaatacacgtgtcaaaggataattagggcgggagctctgacgagattccgggtctccccatttgaatccggtaatagtaatcaaattatatccatttacatacaaccggcaattatccatcttcagtttcttcatgaaagggaaattgaaattataacctatttccacacttttcagacgcaaatagctggcattaatcaaatacaagtcagaccctgcataattattggaagcatgcaaactagaagtacgcgggaatttagcagtgaatgtatcagccgatgaacgccacgttgtatcatactgataaagcaacaatcccttttcatttgtatcacccaacggacgtctgaattcgtctaacatccgatccacattccaagctcctgtccattgcatggaaaaatcaaaattcttccaactgaatccggtattcaatccggcagtgtattccggcatatcggtataccctatatcgcgcgtagcatcattggaatttatttcaccatcggcattcaagtccacataaacgcaatcacccggcaccaatgtaataccatgattagctatcggacgtccaaactcctcttgataacgcatatctgccgtttcatcatagaacccccaaaacttatacatcgaacgggaacctattctacgtccagtctcatacatccaaggctcattttgatctacctcattcttatagacaattttattccttgagaaagaaatattaaagtttgcccaatatctgaaatcatttttcagagtttcgttccatttcaactgtacttcaaatcctctattcaatgtctccccaacgttaacagaaggaagtgacatacctagaattgccggcaaataatcgggtttagataaaatatcactacgatcttccctaaagtaatctaaagaaaccgtcaaacgctctgccaggaaggtggcatccactccataattctgctttactgcagtttcccacttggcatccggattagaacggctgacttcactggcaccgggcattttatttccaacattctgcccgaaataatatcctccatcaccatattgataagaatcaggcaaatataagaatcgttgtgatacatcattacccaccattcctacagaagcacgtagttttaaataattcactacacttttaatcggttggaagaaagattcctcacttacaacccagcccaatgaacctgccgggaagaaaccataccgatttcctggacgaaagttttccgaaccattataacccgcattaaactctgccatataacgggttttccaatcataagtcacacgtcctaccaaacctacatatccggtaggaatgtcagagtactctgacggatagtatttctttgattgattatagagtaacaatgctgtcacattatgatccccaaacttacgggcataattcaatgccagttccatataccagttgcgcgccttagaaaaaccgttatcaggttccccataacttaattgagagtcagtcccatatttacgaagagaaatagatccatcagcatttgcaacaggtgtataataagccttggatgaactcgctttcttagtattagcatattctgaattataagcacctttcagttttacggacaatccttttgtgataaaatccaacttttgattcaatgcaaggtctacattcaacacatttgttgtctttgtctgaaagccttttccataataagagctcaatccatccactcccgtaaaaggaagaacttcagaattagatacaacacgttcaccgtttacaatacctgcacccgcaaaaggaaccgcccaataaagtttgcggaacaattgattctgatcttcacctgattccggagtacgctttgtctctatacgaccgccaatattgactgacagtaaggttgttttcgttacatcaaaatccaaattagcacgataattgtatcgtttgtaatcaaagttaaaatcatctgtcgcattaaactgcttgaacataccgccttgcgtgaacaaaccggcagaaacaaaatatttcatattactagttccaccagatatattcacattatgctgagactgaaaagcagccttattcatacaataatcaatccaattaatatccggatacatcaacggattagaatgattgcggaatgtttccaactgttcatcgctaaaagtagccaccccaccatcatttactttcatcatattataataggaagcatactggtaagaattagcgaactccagatccttcgttcgcacattgacaccagccgatgtagagaaagaaaccttagccttaccttctgcaccacgtttggttgtaatcaagataacaccattggcaccacgtacaccaaatacagccgtagctgaagcgtctttcaacacagtcacgctctcaatttcattcggatcaatctgagaaaagtcacgttctacaccatcaacctgaatcagcggtttcgcattgttccatgtagcgacaccacgcacataaatatctgccgcatccgctcccggctcaccggaatattgtacagaagaaataccggtgatttgcccggataatacattagataaagatcctgccggagtcttcaacagatcatcccccttcatagatgaaatagctcctgtgatagatacttttttctgtacaccataagctactacttgcacttcacccagtgtctgtgcgtcttcttctaatactatatttagactaacacctttctttgcggttacctctttatccttgtaaccaataaaactaattttgattttcgcacttgcaccggatacattgattgaaaacttaccctcaaaatcggtaatggttccttgtgtcgttcctacaacctttacattggccccaatcaccggttcaccataggcatccttcactacacctgtgattcttgtagaattctgttgtactacctccggcatgggagtatcgtcaccatagccgttcagaggaatcaaaagaaataaaaacaaagggaatacgattgggagtaaccgttttttcccgacttgtcttccatggaaggtctttcgcttttccattcagtataaaattaagattaaacattaaataaacaaatctcatgatccttaggaatcacaacgcaaagatagaaacctcccctcctaccaacctccaaagatgctttttagaggtagaattttagacattcgccttttttgaatgataattcgacataaaaaagagcatagaaaaccttccctatacaaagtacaaggattaagcagaacaagataatataaaatagaaaggtaaaccagaacagatttctactcgtgctctttttcaactacaaattggtcgaggtattcagaaggtaaaactccaaactctttcttgaagcaagcactgaaatattttggatcattaaatccgaccgcataagccaattcggagatacgtatactatttcctttttcctccataatccggcaagccgatttcaaacggacgttccggataaaggcagaggtgttcagcccagtcaaagactttagcttcttatataaagtagatttactagttttcatttcatccgcaaactggggttggtcaaattcacaatcttccaaatgattattcacacagtcaatggctcgttgcataaaatcctcatccagactggtataattcaaatcttttaattcaaaaaccagctgtttcttaaattcgtgcgccatacgctccttatatttcagcaaattacgaatacgtgcatgcaatacagccaaattgaaaggtttgcttataaaagcatccgcccctacctcatacgcttccgccctgtcctcttccttatttttagcagtcaatagaatcacaggaatatgactgatttccagtttccccttcacatatttacaaaactccattccgtccatctccggcatcatcacatcagacacaatcaaatcaatgtcttcattctccaacactgcaatgccttcttttccattttcagcagtaaaaacattgtattcatgcctcaagagtttcgtcattaaatgcaatagttcctcattatcttctattactaatatagaatttgccttttcggccgtaactaatatttcatcagactgtttctcatccatttcttcttcataagctactaatttctgaaccggtaagattacttcatcatcaatttgttcttccctgaaataagaacggtcaataggaaggcggataataaactctgttccctgtccttcttcactttccacagtaatagttccttcatgcaactctaccaaatctttagttaatgaaagcccgattcctgtaccaatggtattaaatttccggtaatcaccctcgtagaaacgacggaaaagtgtcttttgtttctctttcgatatccctttcccattgtcctttacacgtaaaagcacccaatctttattttccgcataggataaagttacctgaataaaaccatcttcttttgtatattttgcagcgttagacagcagattataaagaatcttatccaatttatccgtatcaaaataaccaatgattgattccggatcacacaacacagagaaatgtatcttttgtttcttaatcaaaggctgaaaactttccgccccatttttcacaaaggaagcgatatctcccggagatacacgaagcctcagattgccggtttccgcttttcgaaattcaaggatttgttgtaataaacgtatcaaccgacgaatattactattcatcaccacatacaagtctgtatgctttggagcttgtattttaagctcatctacggtagctgaaataattgtcaacggagtcagcaattcatgggtaatatttgtgaagaactgcaacttggcatggttcaactcctccgctttcgccttctccaattcacgcaaacggagttcattccgtagtaaaatacgatttttcgttattctgtatagtccaatgacagttccaatgacaatcaataaatataaaatatatgcccaccaggttgcccaaaatggaggaagcacaacaaccgtcatttcccgaatatatccattccaaataccattctcatttgtcactttcaatttaaatttatacgtcccgcttttcaaattattatagtaagcaaaacgacgctcggcgcttgtataaacccaatccttatcaaatccctctaactgataagcgtatcggttaagttcgggattcttatatgtcagtgccgcaaactctatattgaagttattatatttataaggtaactctattttctgagtaaaagcaggagttaatggagatatttcccgttgcacctccaaaggtaatgtacttatggaacgattgaatatctttatatccgtaattgcaaactgaacatctccttgaatatcttccatatcctcaggaataaagctattatagcctttataaccaccaaaaaacaattctccctcccgactgcaagcagattgagcgataaagaaatttccttgtagcccatcagcttctgtgtacacacgaacaaccggttcgttacttttcatttgagcacccagttttaccaagccgacattcgtccccaaccacaaatttccatttttatcttcttcgatacttccgaccatatctccgggaatattatattcctgatttttctcttcaaaccggtcattctgtctattatacagataaattcctcccccttcggtgccaacccataaacgtcccgatttatctatgtgcaaacacaatacattattggtcagcattcttttattataaaaactataattataatatttcaaggtagacggatttcggatgtcaccttcaatatgaatcagaccataattcgaagtggctatccacatactattatcactatcggcaattatatcccttacataaaaccaattcaattgagcaccatctacaaaactcatattttcgaataaaaagctatttccatccgccaactgtacacctaaacttccacgtgtacctacccaacaattagcatatttgtcttcataaagtgcagaaacacaagaagagcctaagaatttacaattttccggagtcaggtttcttaccctttgtcctttgtggtaagcaaatattccaccatcatacgttccaaaccaaatttctccactaccctttctctggacgacagaaaaaactgtgggaatagtcattccggtaaattccggcatttgtgaatgcgacttcaattttcctgttgcgtattccagacaagctaatccataggtaccgatccccatccaaatattattgtcagaatctgtaaacaaagaccgtacggaagtggtcggaatatcatcatcggcaaaattcaaactatgaaaggtaaacatagactgatgtgtatctgcattcaggactcctcctccaatagaaccaagccacatcataccggagttatcacgtataatggaatttatttcatcacaagaaatataatgagaagagccgcgggatttataattaataaagtgtccgggagtatcattgctcataatactcaacccgctacgtgttcctacccacaaagtattggtattcaagtcttcagatatatcatatacaatatcatcggataaactaatattgtcacctaatttatgccgatagttcacgtaagatacccgctgcaggtctttcggattattgagtttaaaaagtccgcaattccaactacctacccatatatttttattggtatcttcataaataacatgagcagaattacgttcattcaattgaggataggcataaaacttgccggtagaagggacatacctatataatcccgacgaccatgtaccaatccataaatcaccttccgagtcttcgaataaagatttgatagcagtataatccaggactccatcagtctgttcccgatgataaactacaaatgaatctttttcggcaatatatttgcacagcccggaatccgttcccagccatacagaatgatcccgagtaaccaacaaacaagatacgacattattaggaatctcaggagccagaatttttctgatctcccctgtttttttattaagaatattcaagccttcctgagtgccaatccacaagttgtgtttataatcatccaccaaacaaagtatgttgttattagtcagtaaaccgggggcgtaaagatttgatttatataacgttgcctcatagccatcatattgataaaacccgtaacggctagccaaccagataaagccatccttatcctgataaactttctggatttcatctgtaggcaaattattaagagcaggcagtttcttaaaactcaaatgtgaaacaatatcaccttcgaatgcgaaaagtaaagttgaaaataaggcacaaaaaatagaggcataaaaccttctattgatacaagaatattgattgttttccataatacaataattgtaatatttgcaaagataaaaaagttttatgtatatataaggagaattatcattctttttaatcgattttacacgcaaaaacgcccttttctgtaattgaatgatatataaccgttatcgaaacatatttgctccaaagatttgattaaaagaattatctttgaaccctgaaacaaatacctcaagtcatgaaacatttatttatcaggtttcttttattttacctgttttttattggaataagcccaataaacgcacaacacagaaagtctgctaatcctattttatccggctttcatgccgatccggagatcttatactcccggcagaccaaatgttattatatctatcctaccagtgacggtttccccggttggggtggaagttattttaaggtcttctcttcaaggaatttgaaggaatggaaagaagaaagagtcattttagatatgaaaaaagatgtctcttgggcaaacggaaatgcttgggccccctgtattgaagaaaaggaaatagacgggaaatataaatactttttttattacagtgcaaattctgtcactaataaaggcaagcaaataggagtagccacggcaaactcaccgaccggtccgttcaccgattccggaaaaccgattatcacttcctcacctgtcggacaaggacaacaaattgatgtggatgtatttactgatcccacatcaggcaaaagttatctctactgggggaacggctatatggcaggggccgaactcaataatgatatgctgtctgtcaaagaagaaacaatcacggtgatgactcccaaaggcggaactctgcaaacatatgctttccgagaagctccctatgtattcttcagaaaaggagtttattatttcctatggtccgttgatgacacgggatcacccaattatcatgtagcttatgggaccggcaattctccattaggccccattcaggttgccaaagagccgattattctcatacaatctcctaaagatgaaatttacggtccggcacattgttcggttcttcaagttcctgacaaaaaggacagttggtttatcgtatatcatcgtattaataaggaatatctgaaacatggaccgggttggcaccgtgaagtctgtatagaccggttggaatttaataaagacgggacaatcaagcaagtaattcccacaccctaatcccattatcaagtttcattagaaaatgataaatcaggatcaggtaaagtcagtttccttatgggaaactctagtttccaaggctcgaaactttagtttcaaaggtttgaaactagagtttcagagtcttgaaaccaatcgtttcactaagggaaacactttgtttctcggtgagaaacagaatcgtttgccttagctacttttcgcctgtagactctatctaaattgaaggtgataggtgatagattaggtgataggttagcgacaacctatcaccattctgaatgtacgatgaacaagcagtttcagaagggaggtgataggttgaaagaggattcttgttttttacataggaagaggattgcgaatatacagggtccggcatttataatgtttcttctatccgatcagaaagcacaattcctccttgaggataaacttctaattgcacccttcccttttcttttaccttcaaaggtataagctgaggttctcctctcttatcatctttataaagagacactgtttttccggcaaacatatccaaatcaaacttcaattttaacggttcacttccggcatttacagctgctacataccaagtatctccatgacgacgggctaaaactatgtattttcccggataaccttcaatgaaacgtgtttcatcccaagtgacaggaacctgtttcataaaatccatgcaaaccggagaaacatcattcagattattcggagcaagagcaaagttctgaacggggttttggaatagtatggctgtcgccaactggaatatgtcagtagtacgacgagtggtgcctccgtcattgttacgattcagacgcttgttcaggaagcagccgccaaactccatacagcctactgcgttgcgaatgaacggatgcaggcaagtattgaatgcttcttcatcacagaaatgctggctgaacaccatattctcggaagccaacacagcttcgctgcctacataattgggatacatacgttcccagccgcgaggtaaggtgcaaccatggaagattaccattagcccgtggtcatccgcatcgctcaggatctcttcatacaggcgcatcgtctcctgtttgtcgccaccgaaaaaatcgactttgattccttttacacccaggctttgcagccatttcatttcacgtttgcggatgattgcattgtccatgtgattaatcgggccttgttcaatgtcattccaatagccggaggaactgtaccacaaaaataattccactcctttgccacgtgcgtagtcaatcagagatttcatacgttcacggccgatattagtatcccaccagttatctatcagtgcatattcatatcccatagcggcggcaaaatcaatgtaacgcatttggtcgtcatagttgatactgccgtcctgccaaagaatccaactccatgtgccacgcccgaaacggtagtcatgcttcgtctcataaagagggtttacgacatcccaaggaacagtggtttccacaatcggtttcaacgtttcgccgacggtaatcgtacgccaaggggtagcaccgggtaatgcaaatgccggagcaaccgttccgttgccattattctcttcgggcatcgggaacgccactgtgtacagattgccttcactgacatcgctcaaacgggaaccgcaatagcgactgtctactcctgtttcgctcaccagcacccaaccggcgtcaccgatacggaacagacaagggaaagtatatccatgaccgtactgcgaacgttcgctcatcggtgcatccgctttatattcttcttcataactcggttttgtgcgcttccatccgatcatcgcatcgctctgcggacacaggaaagttgtagtctgccgcggaaaacggaaaccggtctgttcatgattgacggtaacgctgcctttccctccctgtcgcggtaaagtataacggaaagcgacatcattattacttacgcggaaaacgattcctatcttctgtccctgcgcattctccaaattacaagtcagttcattcgcacgataatgtatttgggaagtcttaatacgtgtctgatgatagacagtatctatcacctctacggaatgtcccgacaacttcagggctttcgtaaagtcgcctatattcgtgctgattcccaaaggagatttttccagcattgctttcccgttgtaggtaacggaatagcagggagtttcttcgtcctgcacaaatacaactaattgcagtttctcatccgggcctttcactactacatcttgtgctgcaaggctattcaggctgagagatatcgccaatatgcttacaatgtttttcatatatactaattccagcttattatctttagaaaattcacatctacccccagatacgttctttttcacttccagcaacttctacttcgttttcagacgaatcaccgtaaatgaataggcgggtagttgctgcttgaagtttgctccgacttcgatagtgtcggtcacgggaagtggagttgattccggtgcacctgccaatactgtccttacagcagaaggttgaacactgcctatgccaggtaattgtatttctgtctccacactgacaggcaataagttgaccagtttcacaatcacatctccggtcttgctatcgcggacaatggaggaaccgatacgaagcttcacccggttgtcctgattatcaagaattatctgcgaggggatataatggctacctgcattctgcccatataacttttgaacgtaatatccggtagtcggtttcacttcacggttattgaagtaaatcaagtccgggctccattgggtatgcttttcttttgccagcaaaggagcataagaagtcatgtgtactacgtctccattacgttccaaggcggtcaggtaaagagcttcagtcaatgctgtttccatattggctttccgcccgggaatatgagtggcatattcgcctagataaactttagtcttttttgaacggtcgtatttatcgtagaagtcctgattatgcagaaaccaccccggagactgataataatgttcgtctaccataggaatgcctaatttatctgccaacttccaaccttcgacgtaatcggtaccttcattgaaaggaccaactgtacctacaacgattatttcagggtatttctccttaatcgcattgaaaatcatcgtaaagcgttcctcgaaaatatcagtgataagatcctcattaccgatacctatatacttcagattgaaaggcttcggatgtccggattcggcacgtacctttccccattttgtctttcgggcgtcaccattcgcccattctatcaaatccagaatatcctgaatataagcaggcatttcactcatcgggataccgccttgttgtccgcctctcaaatcaccgtgacaagcagagttctgacaaggcacaccggcagcaagcaccggaagcggttcggcacctatatcctcgcaaaactggaaatattcataataacccagtcccatgctctgatgatacccccaaaggttgcgggcagatttacgggcttccaacgggccaatcgtatttttccattgatagatattcttcaaaccgtctccatgagcaacacaaccaccggggaaacggacaaagcgaggatgtatatcggctagtgtctgcgccaaatcggcacgcagaccattctttctacctttgaatgtattctgtggaaaaagagaaatcatatccaattcgacttctcccactgattgcagttgaagttccagatgcgtatcggcagctgtttttgcagtcaatacagttttataagttttccatgaacgggaagaaacggttatcgatgcctctccctgcactgtgccattggaatctatcaaacgtacctgcaatttgttagatttatgtccggccggaatacgtccaaacaaagagaaatcatacttttcgccggcttgaagggctatcccatcaaaccctgcatttgtcagtacagctcccggctgttgtatattcaacacagcgtaatgaggattattcggatgaacgggatcagaggtatttattgtgaatgtggcattatctccctccaacttccaggaatgcgtactgttccaattcttatctccctcacggtcggacgggtcatattcaaaatccctgttttgaatcagttctgcgtataagccaccatcagcagaatagttaatatcttcgaagaatattcccaacagcaaattactgatttcttttgtttcctccggttgtaccgtaatcgtcgcttttacaggtttcagcccggcaaaacgctctttatcttgtaccggacgttctgcgtgcaaaacattccggtattggttcctttcatagtgtttcgtcaatttgtccaccagtgtccaagatacccgattaatatttccggtctgttcctgcccgtcaatagttacctttactcttgttccctcaaaatcagaggttacttgaggatatttctgactttcccaataaaccaggtctttcgattttgcctgcccgtatccgtcatatgtattcaacttccatgtgcagagccatccgccgtcaggaagttgcttcaagaacggatcgagcattttcttctgcgatccccaacgactataatcacaacggaggtatccggttccctgtcctactgcgaaccaatgcttctgatccatgctccaggcaaaacgaagtccgctgcgtccgtcatcccgggaagttacatacgaaaatagaaaaacggaatccggagtgttcgccgcctctccgattgcagctaaagtaacctgttggaacgacaaaaacaagacaattactagcaggaataattttttcatggcataagtatcattaagattatcaatcataaagacaaactcttcactgttatgagaagcacatattgagtgtaaaatcaccaattattattcaaaggcatatcaagaaacaagcgaacaagaacaaattgtacgcctttcctgtcttatgtattattttccagtcttaaggcagcaatttgctccggcttatcataggccggttggtttgccgtagaccttatacaaacgtttcaattctttttcagtgataggtatcacagttccgtgacgagggtgaaagtccatactgacagcatgatctatgactttaaaattttccaggtcggtactttccgtaaactggtatttgcctttcatatatacatcgtacatcaggatatacttgtccgaacctattagcggaaagatactcgaaccttctaccgcttctttcgtctgctgtttgtattcccctgattccgtccattgtccggaagtcagggagacggtagtcgctttcttgatgccgtttccatctccttctgtcttataaaacagatgatacagtccatctttatagatgatatctccgtcgatacatgacttgccatttttaggaagaaacaagggcttcggctcaccttcaaggtcggtaaagtctttattcgcatacgcataataaatgatatctgcgccattgccatgcttcattgaccaatataccatatactttccggcttctttgtcataaacggtctgtggagcccatacacgtttcaggttttcctgggcaggatatttcttttgaatattgacaatattggaagtccagtgcaccaggtccttcgatttcaacagcaccatggcacggttggaatcccaaccgtttccggacaccatgtcggtgacaaccatatagaatgttttaccgttctcacaacgcaagatatgaggatcacgtaccccacccgtagaactaatcacacgggaatcaagtacaggttggttaccattcagggctttataattatatccgtcgaggctgactgccatgcggatcgcttcttcgctcatccggttcccggtaaagtagacaaacaagtaagcggattgctggcagtaaccggtcagcactcctataaaaaggagtgctaaaagggtagtatatttcttcatattcatttaatattcagcacttggctgggagtaatcaatacttgaaatcggctggtttcacatagacacgatattctttaatcatacccggataattcttttcggcacggggcagataacggaagcctgttacagtctccaccttactcaaatcaatcaccagttggtgaggatacgccacattatctactgtcatccagaaagtagattcctgtaaatcgaaaatcttatcggctgtacggttaccgctgcgtgtttcctcactatcggcataacgaatcttccaatgttctcgggataccggtttaccgtccgcacccagaacatcaaattctgcaatagcagcaatattgtcatttgcctgtggtgaaagagcttcgagacaaaaataacgtcctttcaccggagtagtaaaacgtacttcctgccagccgttgcccggagtaaatgcaccttcgtgtgcaaccttctcgcctgtcagtttcagtttctctccctctttgcgatgagtttccggtgctttttcacgaagcacatccaagaggggtttcttcaggcctttgatagaagctttggcgggacctttcaagtcaagaacaagaatctcattctcaccttctttcaaccaacatcccggcataaagagagtctgctgaggaccaatctcccagaaacgtcccatagcatgaccgttcacccataccataccttttccccaagtactcatatcaaggaaagtatcaccgactttgtccagtttaaaggtcgttttatagtaagcaggcatagctggtaatattttcgtatcctgatagttcttattcttaataaaggagtaatctacagggaagctgtacaccgtccagtttttcagttcttttgaccggtcgccggaaacaagttccaccttttccgtgattcccttccggtcgtgaatggacttatcaaagtttacacgtcccatagcctctaccagaatatccagttgcgtccctttcttcaaagcaggcaacaccgtcgtaaactcacctttacgacgatccaaacgtgtcaacagtttaccgtcagcatagatttgtgcccaatcatgcacttcggtaatcttcagagtcgttccggattttacagcttcgggcaatgtcgtccgatacagaattgttccccaaccttggttaaattgttccataggttgaatatccaccgtttgttttgcttccggcagattagagaaaagaggagctatttttgtaaaatgaaactcaggaatttcaatgaccggcaatgcggcaggtatttcaggcaacgcttcaccggcaggaagatatgttttcaataaatcgcgaagcaggaaatacttctctgtcgtccaaccggcttcactgataggagcgtcataatcataggaactgcacatggcagaataagcaggattattagcacctccccaatgtccgaaagtggttccaccgtgagtcatataaagactgaaagaaatattacgatcgagcatatccttgattccctgtaccatatcttttgcaggacgcgtctcatgttttcgtccccaatggtcgaaccagccactccagaattcactgcacatcaacggagtttccggacgaagttctttcagtttcttgaattgttggtcaatattggcaccggttccaaaattcactgtccagagcaaatcctccaatgcgttatttgtgaagttactactccagtcacactggaaaagaggcacatccgtaaaccctgattcgcgtaccaaatcacgcacggcagctacataaggcttgtcggttgcataagagctgtattcattctctacctgcaccatgatgatattaccacctttatttatttgcagtggcgccaattgtttgccgacttctttcataaagatgcctacgcgctccatataatagggatcgagggtacgaagcgccacatcttttttcttcagcagccaccagggaagacctcccatttcccattccgcacacacataaggaccgggacggacaatgacatacatcccatgcttttgtgccgcacgacagaaagcagcaatatcgttctgaccggaaaagtcaaacttaccttcttcctgttcatggatattccaaaagatatagatacaaatggtattcatccccaatgctttgcacatctcaatacgatgttcccaataagcttgcgggatacgggtgtaatgaagttcggcggccttcaccacaaatggttcaccatccagcaaaaaggtattcttgccggcttcaaatttgcgggcagtagtttgtgcctgtgcactactaaagataacgactgtaaaaagtaccagtaaagcaatcaatctgtttctcatggtttattcaaaatagaattttaatagtatacgacaaaggtaggcgattcacctaaatccgagggcataattatcattcaaaaagggttagaaataaagcaaaataactacaaacagggccattttcatttattttcccactacaaaagcaatatccagcataagtccggctatcagtcataacaccaaaatcagttttctttcgtcaacatactttccagttcttccgcattcaggcgaagataaaattgcccgcgataggcgacagagatagctcccgtttcttcggaaacaataatggcgtgtgcatccgactgctgtgagatacccatagcggcccgatgacgcaagccaagttctttaggtatattcaaatcgtgagaaacaggaagaatacatcctgccgctttgatacgtttcttgctgataaccattgccccgtcatgtaacggactattcttgaagaagatgttttcaattaaacgttggttgattgccgcatcaatcatttcacctgtacggacgatttcgtctaaaggaacgttatgctcaatgacaatcagtgcaccgactttttgctttcccatgctcagacaagccattaccacaggcataatatcatcatgtttcaatacttctttcttcgccccgttaaagagacgggccaatgcactgacatgccggtgagaacccaaagtcagcaagaaacggcgtatctcgtcctgaaacagtacgatcagcgctatcacgcccacattcatcaaagtatcgaagatggaacccagcaacttcatctccaaaacctgagtcaccaccaaccagatcagtataaaaaccagaataccggtgaataccttgatagagccggaagccttcatcaacttgtatgtataatacagcaagaaagccgccaacagaatatcaataaaatcttttatgccaaattcaaaaaacatcgttctctgattttaatttttcaacaatgcgaaccgcttccactgcttcgcgtacatcatgtacccgaaggatgtgagcgcctttcattaacgcaacggtatccaatatagttgtcccgttcaacgaatcctgcggagtgccccccaacaatttataaatcatagattttcgtgaaactcctaccaacaaaggtaattcgaatatacggaactcttcgagatgtgccattagttcataattatgctccaacgtcttcccgaacccgaatcccgggtcgagtatgatatccttcactcccaaatcacgaagctgctgaactttacgcgcgaagtaaaggaaaacgtcctttatcagattatcataatggggttctttctgcatattctgcggggtgccctgcatatgcatcatgatatagggcactcccagtccggctactgtctgaaacatccggtcatccatttcaccggcagcaatatcgttaatgatagcaacgccatactcgtttacgcattgcgctgctacatcagcccgaaaagtatctacggaaataatagcctccggatgattgcggttcagaatctccagaccggtgcgtaaccggttcatttcttcttcggcagaaatatgttctgcattaggacgcgaagaataagcgcctatatcgataatagcagcgccttcatcaatgatttgtcgggcccgggcagcaatatcttcttcggtctgcatccggctaccggcataaaaagaatcgggagttacattcagaatacccattacctgcggaatggagagatcaagcaactgcccttttacatttatataaataggagacgtagatttcatcattgacagtattccttttagattgcccacaaatgtagagaaaaaaagcaagcaatcgtactaaaaagaagaaataaacgtatatttgcaaacaacagaagaaaccgaaaacatcataccatgagccaaacagccctatctttcacccgatttctttttttatttttattctttaccgcttctgtaaaagcccagaaagaagctaaagactttaacgttgactctaccctttatgcctattatcaacgttgtcaggaatgcttattgcaacccgttgtacttagcatgtccgataccttgtatcgaatggcagaggaacggcatgataaacggatgcaggcagtagctatttccacccaactggattatcattattttcaggcaacaaatgaagacagcattatctattataccaataaggtgaaagacttcgccaaagcaacccaacaacccaagtattattatttcgcatggtcgaacaggcttattctatattatctgaaaaacggtagaaccaatattgcactttatgaagcgcaaaagatgctgaaagaagcacaagaggaagacgacaaaaccggtctgtcccgctgctataacatcatgtcgcagatttatacagtcaaaagactggattccatggctttcgaatggcaattgaaagaaatagaactgacggaaaaatatgatctggaaaactataacatctcgcaaacatacagccagataagcagttattacatcaataccaaccagccggaaaaggcactggaagcattgaaaaaggcggatgcaaccgcatactcccctacacaaaaaatatccgtgcaactggaatacgttaattattacagcaaattcggagatatgcaggcagccgagaaaatactaaacgaatgtaaaacagcatttgatcaggataaaagattatggtcgataaagaaaagactatataatatagaatacgtctattatctgcaatccaagcaatacccaaaggcactggaagctgccaagaaacaggaagcggaggaattaaaccttagcgaaagtatacagaacagtgtccattacctgacgaaaggaaaaatatacagcaatatgggtaatatgagcgaagcaatcaaatacctgcaaatgtatatcgaagcagaggattctttaaagatagccaatgaacaaatggccagcagcgaatttgccactctgctcgaagtggagaaactcaatgccgaaaaaaaggaattaatgctccaggcacaggaaaaggagatacgcaataagacgacattaatcatctcattaattgttttgttaggtatcctattcatgttcttatacagagagaatttcctgaaacgtaagttgaaagtttcggaaagcgaacttaaaatcaggaatgaagagctcactatatcccgggaggaattgcacaaagccaaagatatagccgaagcaagcagccggatgaagacaacgtttattgaaagtatgacacatgagattcgtacaccgcttaattcgattgtaggcttctcacagattttaaatgaccattatagcaatagtccggaaactcaggaattcgtcaaaatcatagagaataatagtaatgacctactccggttagttaccgacgtgcttgctctgtccgaactcgaccaatatgacaagctacctacgaatatcaccacagacgtcaacgccatctgcgaacttgcttacgaagtagctaaaaataagagccagaaaggagttgaagtattcttcaaacctgaaagagaaagcctgtttatactcagcaatcaggaacgtatctcacaagtattgaataatctgatgcacaacgctgccaaattcacctcgcacggaagtatctgtatagcgtattccatatcggaagctgaaaagaagattgaaatcagtgtcaccgatacaggaatggggatacccgcagacaaacaaaattgcgtattcgaacgtttctataaagtaaattctttcacacaagggacaggactaggactttctatatcccgaagtattgcagaaaaactgggaggcagcctccagatagattcttcttatacagacggatgtcggatcgtactaaccttacctttagtatacgcctaagcaaaaaaccgtccgaagccgtatctaatccgaaagaatagcctatctttgcaacgttttaatagatgttcaggttatgaaactttctgctatttaccagatttttctggattgtcaatcagtaaccactgatagccggaattgtccggacggttcattgtttatcgctctgaaaggcgagtcattcaatggcaatgcctttgccggaaaagcgttggaagacggttgcgcatttgctattattgacgaggcccaatatgccatagagggtgatcgacgatacatactcgtaaacgactgcctgcaaacattgcaacagctagccaactatcatcgacgtcaactcggaacacgggttatcggtatcaccggaaccaatggaaaaacaacaaccaaagaattaatctccgccgttctttctcaaacgcataacattctctatacccaaggaaacctgaacaaccatatcggagtgccaacaactctactccggctgaaaccggaacatgaccttgccgtcatcgaaatgggtgccaatcatcagggagaaatcaaattcctttgtgaaatagccgaaccggattatggcattataaccaatgtcggtaaagctcacttggaaggattcggttcttttgaaggtgtaatcaagactaaaggagagctgtatgacttcctccgcaagaaaggaaattctacaatctttatccaccatgacaatccctatctgatgaatatagccaaaggattgaatctgatttcttatggaagcggggaagatctttatgtcaacggctgcatcacagggaattcaccttatctcgctctcgaatggaaggcagaaaagaatggtgaaatccaccggatacggacgcagttaatcggagagtataatttccccaatgccctggctgccattacaatcggacggttcttcggggtggaagaccggaagatagacgaagcgttggccggatatacaccccagaataatcgttcacagcttaaagagacagcagacaatacccttatcattgatgcatacaatgccaatcctaccagtatggcggctgccctgcaaaactttcggaatatgacagtttctcacaaaatgcttatattgggggacatgcgcgaactgggcaccgaaagtctgaacgaacatcagaagattgttgattacataaaagagagcgactttgaaaaagtatggctggtcggagagcagtttgcatctgtctgtcactctttcaagacgtatgcaaatgtacaagaggtcataaaggaacttgaaacaaataagcctaaaggctataccattctcatcaaaggttccaatgggatcaaacttagctcaacagtagaatatttataatcactgtttcatcattcttggacgcaccacataataagcaaccagacttgcgagcaatgctccggtagaatttgctgcaaaatccagccagtctcctccacggtaactggtacaatattcttgcagcaattctacacacccgctgaacagcacggggcagaagaacgctcctacccaagcatgccacaacggtgcctcgtcccggcgatgtgcacgcaaaaattccagccacaacatacctgacataccgaaatacatacaaatatgaaccagcttgtctaagttaggaatctcactcaaatccgtcttgggcggtttaaaaaatgaaagataaatcacagtcaggattataaaaagtgagatcggatatttcttaatataagatagcatatctaaataatattacatatttcgtgcaaatataagtatcattttctatatttgcactcttataggtatattttataacgatttgtaagataaaacaagatttatgacaaaaaatgatagagcgaacttcggtagtaagttaggcgtaatacttgcttccgccggctcggcagtaggactgggtaatatctggcggtttccctatgaaaccggaaatcacggaggtgctgcatttatattaatctatttagggtgtattctccttttagggcttcctattatgattgcagagtttctgataggacgccattcgcaagctaatacggcaagggcttaccaaaaattagctcccggcacacattggcgctgggtgggacgtatgggagtattggcaggtttcctgattctcagttattatgccgtagttgcagggtggacgctggaatatattctcgaagctgccactaatggtttctcaggaaaaacctccggagaattcatcacctcgttccaacaattctccagtaatccctggcgaccagttatctggttaatagccttcctgctgattacgcacttcatcatcgtgaaaggggtagaaaaaggaatcgagaaatcttccaagattatgatgcctaccttatttattattatagttatattggttgtttgctcggtcactctaccgggagccggtgcgggcatcgagtttctactgaaaccggactttagcaaggtggacgggaatgtatttttgagtgctatgggccaagccttcttctctttaagcctgggaatgggatgtctttgtacgtacgcctcttatttcagcaaagagaccaacctgacaaaaacggctttcagtgtaggaatcattgatactttcgttgcgatattagccggatttatcatcttcccggccgctttctccgtaggcatacaacctgattcgggtccaagcctcatctttatcactctgcctaacgtattccaacaggcattcggcggagtacctatattagcatacatattctctgtgatgttttatgcattgctggcaatggctgcattaacctccacgatttctctgcatgaggtagtaaccgcctatctgcacgaggaattcaacttatcccgtggaaaagcagcaagactcgtgaccggaggatgtatctttttgggaatattctgttcactatccctcggagtgacgaaaggattcacgattttcggtttgggaatgttcgacctcttcgactttgttacggctaaaatcatgttgccgctcggcgggctctgtatttctctctttaccggctggtatcttgataagaaaatcgtctggtcggagattacaaataacggttcaatagaaattcctgtatacaaactaatcatctttatattaaaatatatcgcaccaatcgctatctcactgatatttatcaatgaactgggactaatcaaactataatgtggaaagactttttttatttcactaaaaccgaacgacaaggcattatcgtccttgtcgttcttattataggggtattctcaattccccggctcgtgcaactattctccactcctcaagaagttactcctgaagaagatgagaaattcaagctagaatatgatgaattcatttcatcgatcaaagaaataaaacctcaaaggaaattcgcagaaggggaccctccgaaaaactattcctattcaccaaaagaagtcaggctctctatatttgatccgaacactgccgattccattacttttatatcattgggattgcctccgtggatagctaaaaacattctgcgttaccgcaagaaacagggaaagttccgtcatccggaagatttccgaaagatatacgggttgacagacgagcaatatcagactttacatccttatatccgtattaccgaacagtcctcaacaaaagataccgtccgactattaatgaaacaaaggatgccgcaggataccctgtttaaatatcagcccggcaccgtcatcaacctgaatgaagcagacacgaccgaacttaagaaaattccaggtatcggaagtgccattgcccgtatgattgtaaattaccggacacagctagggggcttttataaaatagagcaattacaggagaaacatttaaaagcagagatgctccggccctggttctctatcaacgcaacccaaatccgccgtattaacataaataaggcaagtatcgaacggatgatgcatcatccgtatataaactactatcaagccaaagttattgtggaataccgaaaaaagaaagggatcttgacaaacctcaagcaattatcactttacgaggaattcaatacagcagatttcgaacggattactccttatatttgttatgaatagttcctcgtttgtcacaataaataaaaaaagatgcattcctatcacaccagacaagaatgcatcacacacaaacaaaacaaacactctactatcatcttcacagacttccgtagagaagcgactataaatatatagctaaaagatagaacacttgcaaggttctacctttttggtatgcatttttagaagttgagttctcttattaatcttttttaatcatgccgtcaaccatatgtatcgttcggtcggtgattttcgaaagtccctcgtcatgggtaacaatcacaaaagtctgtcccaaacgctccctcaggtcaaagaacagttgatgtaaatcttctttattatgtgtatccaaactaccggaaggttcatccgccagtattacagccggatcattgattaaagcacgcgccacagcaacgcgttgtttctctcctcccgacaactcattcggtttatgggaagcacgctctgccaatcccataaaatcgagtattctaatagcatgttcgtttgcctctttcgaagatactcctgcgataaacgcaggaatcatcacattctccaatgcggtgaactccggcagcaattgatgaaactgaaaaacgaaacctatattcttattacggaatgcagagagttctttttctttcatccggctcactacagttccgtcaatctgcacattacctgcatccggttcgtccaacgttcccatgatctgcaacaaggtagtcttacctgccccactaggacctacaatactgacaatctcgcctttgttaatttccagatcaatacctttcaggacttgcaatgaaccgaagctttttgttattccttctaattttatcatgatatttataatcgtttaatgacatattccgccaaatagcagccgaacacagccggcatataactcactgtcccgcaagttgatttcttattctgttcatcatcagtcagcaatacagctttcggatcagcctgttcggtactgaatactaccggaagtttacgtttcattcccattttctgcaaacgtttccgcaccgccttgcttagtccacaatgataagtatcccaaagatctgcaaaacggacctgagagatatcgctctttgctcccgctcccatactggacacaatcttgatatgccgtttcatcgcctcataaatcaagaagcacttcggactgattgtatcaattgcgtctactataaaatcatacttgcctgcgtccaatagttccggtatattctcatctttcagataaacagggagtaccgtcagttcaatatccggattgatatctttataccgggtagccaatacttccgctttcggcattcccaacgtagagtgcatggcaggtaactggcggttcatattcgtaggctgcacggtgtccgcatctacaatagtcattttgccaactcccgtacgacaaagcatttcggcagcataagcgcccactccgcctaatcccacaaccaatacgtgtgccttccggatgcgattcatcttttcttctcctaacaggagttccgttctttgttgccagtcgtttttttccattagcttttctttaaccatttatagaaccatttacccactttctcataatgttgtgattcattatgaccgcgcggatcagagaaagacacaatttcctgcggatctccgaattggtcgggatacaggataatcaaactattgtttgagaaatattttcctagctgcgccggaagacgttcgaaagaggtgtcataagagatagaaccgcgacgggctgagattaccaccagcaaatgatcatagttcacttgccctgttaataacaaaaggtcttcccattcttccaacaaggaaaattcagtcggagttcctgcatattttttctttaccagttgctgaagacgcatcagcgtacgttcattggaaaagaaatgcacgcgacatcccagaatacttcccatacggcagaaatgttccacccattttgagaacccggtttcatattccgcctttggcggtacggcaatatttatccggcgcaaggtattaaccggcatcagaaacttagcgatcatcacctcgcgatgtgtacctttcaaaaggctttccgccaaattcccgaaaaaggtatcaacaatattcgctttccgatgcagaccgattactacatccgtagcttcatattctttaatcgtgtggataattcccgaagcgatgttcaggtcataacggctgaccatatttacaggaacatcggcagcagcagcaatcattgccgctttttccaaatttcgctttccttgcagttctttcttctccgaactgttactatcattaataacgtttaatgcgattaaaccattcttctgtttggcgtcttttatcactaaagccagatttatcaaatcctcaattgtatccgggttagccacgggaatcaatatctgttcggtacttttctttgcaccttgttcctctgattgcaattcctcattcatagcgaaacggcgggcggaacgttctgttaccaaagaactgattacacaagtaaaaagaatcatcaccaccgtaccgttcaacacatcatcattcagcaaacgctccccattctccataataatttcgtgaccgatcaataccgctgcaagcgtagctgctgcctgagcattactaagtccgaatatcatactccgttcattcggttgcatacgataaatcttctgcgtgatccatgcagccagccatttactaaaagtagctaccactgtcataacgacagcaactttcaatgcctcgcctccggtaaacaggcttcgtacatcaataatcattcctacaccaatcaggaagtaaggaataaacagtgcatttcctacaaattccaaccgattcatcaagggagatacatgaggaatcagacggttcaagaccaatccggcaaggaaagctcccaaaatgccttccattcctacaaactccattaatccaccgccgagaaagaccatcgccagcacaaatacaaattgcatcacgctatcatcgtacttccggaaaaaccaacggccgatacgaggaaagaagaaaacaatcagaaatccgagaaaagcaacttttgccacaagaaatccccagaaccaaccgtcaacagttcctttgaacataccgcctatgacggcaaggattatcaaagcaagagtaacggtaacagccgtaccaccaatcgtaatattgacactgcgcaaacgcgacaatccataacgactgataataggataagctatcaacgtatgagaagcatacatactagccagtaacacagcggtaaggaaaccataacccaacacactcatactactccagatacccaatcccattggaataagaaaagtgagccaaccgaacacaatgcttttcgtccggttcttcttgaagtcttccatgtccatttcgagtccggcaaggaacatgatataatatagtcctactttaccgaagagttcgaagctgctgtcacgatcgagcacgtgaaaaccatgttcacctatcagtactcccgccagaatcatgccaataatatgaggtatatgaaggcgtcccaaaatcatcggagcaaaaagaatgataatcaataccaaaaagaatacccaggtcggatcggttatcggtaaagtcaaattaaaatcaaacaagttcataggctgtggctttaggaattcaatgcaaaggaacaaaaaagttcgcataccaccaataagttacaaggtttgagtcgtgagttttaggttatttcaatacaggttctatcagttactgctaaaaactcatagtcttataacttttttctcacccgaaatactaattatatggcaaaatgttataattttgcagccaaatatcttctattcgacagtgtaagaagataaatacaatattcacaatttaacaaaagaaaaagatgaaagtagctattgttggcgtaagcggagccgtgggacaggaattcctgcgcgtgctcgatgagagaaacttcccgttggacgagttagttttgttcggttctaaacgtagtgccggaacaatttatactttccgcggtaaacagatcgaggtgaaactcttacaacacaacgatgactttaaaggggtagacattgctttcacttctgccggagcaggaacatccaaggaattcgaaaaaacaatcaccaagtatggtgctgtgatgatcgataactccagtgcattccgtatggatgccgatgtacctttggtagtgcctgaagtaaatgccgaagacgcattggaacgtcctcgcggcgtcatcgccaacccgaactgtacgactatccaaatggtagttgcactaaaagccatcgaacagctttctcatataaaaaccgtgcacgtgtctacctatcaggcagcaagtggtgcgggtgctgctgccatggacgaattgtatgaacaatatcgccaagtattggctaacgaacctgttaccgtggaaaagttcgcgtatcagttggcattcaacctgattcctcagattgacgtcttcaccgaaaatggttacaccaaagaagaaatgaagatgttcaacgaaacacgcaaaatcatgcactccgatatcaaagtcagtgctacttgcgtacgtgttcctgcattacgtgctcactctgaaagcatttgggtagaaacagaacgtccgatttccgtagaagaagcccgcgaagcattcgccaagggcgaaggattggttcttcaggacaatccggcagaaaaggaatatccgatgccgttgttccttgcaggtaaagatccggtttacgtaggacgtatccgtaaagacctgacgaacgaaaacggactgactttctggattgtaggtgaccagatcaagaaaggtgcggcattgaacgcagtacagatagctgagtatctgattaaagtaaaaaacgtataagaaggcataaagcctaaggatatccaaatgatcgacttagggatattcctaaaataagaaaatgcaaggcaactaattcgctatgaattagttgcctttttacatctttaagcattccctcgaaaatacagttgacgacgaaaacgggagtaacttactgtttttcttattattacacaccattttttaatattagtattctatttcacagtatgagcccacacaaaaggaatataattgaacctttttcctttttccgttatattaaagactatttcctttttcaactttatttccatttcttgataaacagaaaccggtactgttgcaagcatactaacagccggaaaacgatattctacatcacgtattattcctgtgttagtatcaacacgcagtattattataaatttgcaaccttgtacccgcgttctctcctcttcagaaaaagattcattcaaaatagacaaacattttccccataactgactatcatctacaaagtttgcctcttttctttcagcatcagtaatttctgcgcccgtttctttattgacagcttcaacttctgtaaacttattacttttactatatagccttacagacttggattcttgtgttacatcacaaacataacgctgagcataaaacacctgagtagtatcataataaaatgtttgtgcatacatatcaactagcacaaataacaaactaactaggactattactttttttctcatatcaacaatttttagctatttctcttaaattttcaaaatcaaattccacaccacgactattgtcatatggataatctttataggcatcagtttttctaaaaacatttacaatattattttcaataagaccattcacatattccggtgacatatcaggtagtaatctccttttattgttaatatatgtacttaacatctgtatcgctatgcctcgattgtctgcatgctcagccgcaaacgaccatcctggagcatcatcctcactctttaataaataacagtattgcgcaaaatgtgcctcaatttcatgattcattttcgcattacagaatgaagtgatgttcttctcctttcgatactggtacgcatgaaacaatttatgaaaaagttcgttgctctccaactttgaatttattctaagaagattgttttgtggataatatgccgtatctatctaaaaatgtatatcaaaagtagtaaataataatattaaagacaagatatatatagtttttctcgaaatcaattaagcaaataaattaacgtaaccattgcattcctgcttctctggcagttgccgtggtgctacacaatttctttgtcgtaaagctggagaagatttcctttacgctatgcagttccgtgatcggtgatttcgtcatgatggggcaagaggaagagaaaggaaccgtacgctgtgacctcaccggaaatatttattcggaaacagtattcgccagtatcctgtccatgttttatttccgccggttgatgtccgacgagcgttttccagacactctcaacggagtaaccgttactcccaaaatagtacagacggagaacttcaacttccgaagtgcccctaccgatataaacaccccttctatcaggctgtaccctctgttggagtccatgtccggacgcgtagacttgaaaatgcccggcataacattcacttcctatacggataaatatgtaatgccccgcttcgaacagtcttttaatgttacctataaataaaatgaatcagagattaccggaagcctataaaacagaatggctcccggcagtccttgattattatttctaaattccacttaaaacaatagacgattttttttctttattcaacagaaagccatacctttgtccccgtaatcataagataagccgcaattgtctctgcgttattcacaaacaaatacggttaaataaaatgactttatacaaaaccgtatgagaatttgtaagactttcacgtttctaagtatctttattgtcttattctataattgttcgcttcccgccgacgatgaagatgagagaaatccagaagaagataatactacatccgaactgccctgggaaggagaaacagataaattcacaatcaactctaaagaaggactgcgcctgaacgatccgcaagaaaatgcaggaaccgcttatgtcactataccttccaactccgtaaagaatacccgttgggagttcggagtccgccttacattcaatccttccgccaacaattatgctcgattttacctgacttcttcttcaaatgtactctccggcaacgtaaacggttactatatccaaataggaggagccaaagacaacgttgccctttaccggcagaacggagaacaacccaagctgttggcttcgggaagggaagtgatgaaaggaaacaactcacccaagttatacataaaagtggaatgtgataacaatggttactggactttctggacacgactggaatcagaaaatgaatacaccaaagaaaagcaagtaaaagacaacagcatcctgacttctctttattgtggaatatactgtatttataccaagacacgttgtaaaggtttcacattccaccatatacaattgtccaatgatgtggagactactaccaaacctactgaaacacctgatgagccagataaacctgatgttcccgaagatccggttctgcctgattatccggaagaagtcaagaatatattatcattcaacgaaatcatgtatgacaatgcaacagacggtgcggaatacatagagttttataatccgggtaacaacgatatttctattccggcattaaaacttctaagatatatcgacacagataacggctcaacagaaaccaagacaacggtagtcttgaaacacccggacaacaatcaaaacatctgcatttcttcccacggatatatatgcctgaccaaatctgccgccgcacttagaaaaaagcataaagtaaacggagaaaccattatagagattcccaacttcccgaagttgactaatgaagacagccacctggctataatgactaacgaagaaaatccccgaatgatcgacaagtgcagctatcttgagtcaatgcatagttccggtaacaaaaggaaccaaggtatctctctcgaaaagaaatcaccggacttagtatcttcaaagcaagctaactggcattcttccaaagacccgacaggaggaacacccggaataaagaatacacaagaataatcagggtttctatgataaatgtctatattcaatcctccaaacagagtctaaataaagagcgaaatgagaaacctcaatttttacaatccaaaaatattaccacaattacaaactaatccctatctttgcagcaaagccaataaatgtaaagtataaaacaacatctaatcacatatatatcatgaaaaagcaacacttgataattattcttttattcagttttctattagccgttccggctgtacaagcacaaaagaaagttctacctgcagaactggaagttgaactcaaatatggcgccgaccgtctcggtaaaagacaggaccctgctatgcagaagtttcgcgaaaaccgtttgggtgcattcattcactgggggttatatgccattcccggcggtgaatggaacaataaaacataccacggcgctgccgaatggttgaaagcgtgggccaaagttccgactacggactggctgaaacttatgaaacaatggaatccccaacagtttgatgccaagaaatgggctaaaatggccaaagaaatgggagtaaaatatgtaaagataaccaccaaacaccatgaaggcttttgcctgtggcccagcaaatatacagagtatacggtagctaataccccttacaagaaagatatcttgggagaattggtaaaggcttataatgcagtcggtatcgacgtacatttctatttctccgtgttggactggagtcatccggactggcgaagcagtatcaagacccaggaagatagcatcgctttccaaagattcctgacatttaccgacaatcagttgaaagaactggcaacccgctaccctactgtcaaggatttctggtttgacggaacatgggacgcaagtatcaagcaaaacggttggtggactgcacacgtggaacgtatgctgaaagaaatgcttcccggtgtaactatcaacagccgattgcgggccgatgattacgggaaacgccatttcgacagcaacggacatctcatgggggactatgaatcggcttacgagcgccgcctgcctgatcccgtaaaagacttacacgtaacaaaatgggattgggaagcctgtatgactattcccgaaaaccaatggggataccacaaagactggtcactgagctatgtgaaaaatccgactgaggtattggcacgtattgtacacgccgtatccatgggtggaaatatggtagtcaacttcggccctcagcccgacggagacttccgcccggaagagaaaaagatagccgatttcatcggtaaatggatgaagaaaaacagcgaatgtatctatggttgcgattatgccggctgggagaaacaagattggggatattatacccgcaaaagcaatcaagtctatatggtcgtattcaaccctccctattccggacagctcacagttaaaactcccaaagggataactatcaccaccgcaaagacattgacgggtgaacaaacacaggtaacagaaaccactcgcaatgaatataatgtcagcctgcctaaaaatatgccgcaggagccgtttgttattaagttggaagtaaaagatgcacaaaaaacgcaggataagtaccgggaagcgcttacataagtgcgaaacgaatcgaatcctttaaacagtagatatgagtccaatcgttttgtccgttactatcgtggcatacttcgcaatcctgttcacaatctcttatatagcaggacacaaggccgataatgaaggtttcttcgtaggaaaccataaatcggcatggtatatcgtcgcttttgccatgatcggctccaccatctccggagttactttcgtttctgttccgggcatggtgcaagccagcagtttttcctatctacaaatggtattgggattcatcgtcgggcaaattatcatagcgtttgtgctcgtcccgcttttctaccgcatgaatttggtatccatttacgaatatttggagaacaggttcggctcctcgtcttataagacaggcgcatggtttttctttatctcaaagatgttgggggcagccgtacggctattcctcgtttgtctgacactgcaactgctcattttcgagccctttcacctccctttcctgctgaacgtcattctcaccgtatttattgtgtggctctatacattccggggaggtgtgaaatcactgatatggacagatgtactcaaaacattctgtctcgttgtttctgttgtcctgtgcatttattatatagcttcgagcctgcacctgaattttaacagcttagtcactaccctatcggacagtgatttctccaagacattctttttcgatgatgtgaatgacaagcgatatttcttcaaacaatttctggcgggtgtatttaccgtcattgccatgaacggactcgaccaggacatgatgcaacgtaatcttagttgcaagaacttccgggattctcaaaagaacatgattacaagcggcatctcacaattcttcgtgattctgcttttcctgatgttaggggtattactctatacattcacagcgcaacaaggcattaagaatccggataagagtgatgagatattccctatgattgccacgggaaactactttccgggtatagtcggtatcctattcatcatcggattaatagcttccgcctactcggctgccggctcggcattaaccgcactgaccacctctttcactgtcgatattctgaatgcacagaaaaaaggggaagccgctctcagcaagatacgcaagcacgtacatatcggcatggcaatcgttatgggaatcattattttcgttttcaacctgctgaataataccagcgtcattgatgcgatttatacattagccagttacacgtatggtcctattctcggattgttcgccttcggtatcttcaccaagaaacaaatttacgataaatatatcccgccgatagctatcgcttcccctgtcctctgctatatcctgcaaagaaattcggaagcatggttcaacggttatcaaatcagttacgaactgctattatttaacgctgcatttactttcaccgggctttgcttccttattcgaaagaaatcaaccataaacaatacgacagctctttaataccaattagcaaaatgaaaaaaagaatcaattgctttatacctttcggcacttcggaagatacaatgcaaacagtgaaagaattacaagcgtcagagctagtagataaaatctatttattaggttctgctcccggtaagaaatgtctcccggattgtgaatggctccctatcgatgggctttactccacaagtacgatgaaaacaatcgcagctcatgcaagtacagactacattctgttgtacaccaaacaaactccattaaagttgggattatatgcattggaacgcatggtgcaagttatggagaacaacaagaaaaatggaatagtatatgccgaccgctatcaacagattcatgaagaactaaaacaagcacccgtcattgattaccaattgggaagtgttcgagatgatttcgacttcggttccatacttttattcagcacttccgcattcacttacacagcggataaactgtacaaaagatatcaatatgcaggactatataatatgcgcttgttcatagctgtcaactattccattatacacattaacgaatatttatataccgaagttgaaactgataccagaaaaagcggagagaaacaattcgactatgtagatcccaaaaatcgggaagtacagctcgaaatggaagctgcttgcacagaatatctgaaatgcattgatgcctacttaatgccttcttcttcacggacagtcaatctttgcaacgagacctttgaatttgaagtatccgtaatcatccctgtccgcaatcgtattcatactattcgtgatgcagtcagctctgctttaaaccaacagactacctttcctttcaacgttatcgttatcgacaatcattcgaccgacggaactaccgaagcgcttcaggaactaagcgcagacaaaagattgattcatttcattccccaagagaatgatttaggtataggcggctgctggaacaagggtgtacatcacgagaaatgcggaaagttcgccatacagttagatagcgacgacttatataaagacgaacatacaatccagaaaatcgtggatactttttataaggaaagctgcgcaatggtgataggaacgtatctaatgaccgacttccacttgaacgaaatagcccccggcatcattgaccataaagaatggacattggagaacggaaaaaacaatgctttacgcatcaatggtttgggcgctccacgtgctttctatacccctatcattcgtaacatcaaatttccaaacaccagctacggtgaagattatgccataggattaaacatttcacgcgattataagatcggacgtatctatgatataatatacctttgccgacgttgggaaggtaattcagatgccgcattaagtattgaaaaagtcaatcagaacaacttttataaagacagaatccgcacttgggaaatacaaagcagaattcagatgcatacgattgatgaagattttcaggagcttgtagaagaaatgatagaagatcagaaagaaaactgggaactcgcgaaaaagaattatgaggcactggaagaaaatctggaaaaagcaaaagaactggaagtcgaagaagatgatattgaaatggtgttccgaattttccccaaccctcaacgcgccctctccactatggcaaaaacggatacccgctccattcaggaaagaccatgtttcttatgcgaaaagaatcgccctgcagaacaaaccagtttgccgttcggacattatgagatatgcctcaacccttatcccatttttcagcggcacttgacaatcatcgacaaggaacatacctcacaaagcattaaaggacgtttcgaagatatgcttcacttagccgaaaatatgatagacttctatatactctataacggcccggagtgcggtgcttctgctcctgaccacatgcacttccaagcagcaggaaaagaggaaagtttatctactccctttttcaaggattttctgaacgatataatagaacaaacagacttcgacgatgtcccggctatcgtaaatagctatgcaaacaatacttttataaccagcattggtctagcatcaattctcaggtctgaattaatagagaaattcgagaatatctacaacatcctctctaccttttacggtaaagaacctttaatcaatataatagcttggtatgcaattgacagtacaaagcatggcgaagatgatgaagtggtagcttggaattgcgtcattttcctacgttccaaacatcgtcccgactgttactataaccaagggggaaaaggattgttaataagtcctgctgttgcagaaatgggtggtgttttccctattatcagagaggaggatatggataaattaaacacaaaagagattattgatatttacaaggaaattagtttgtcaccggagcagtttgaaaccctatgtgacgaattattcagaaaagacgaagtgtaaaactttatgcaggagcctgtcattacagtcggtattctttccgggaaagagattggattctctttcccgaaagaatttatatcttctgacggaatagcaatctgcggaatacaacaggccgtctatcggaaaggaaaaatctgttggcaggagaaagaatatgacgaactctccttcactccccaacaagatacttcttctttctttgaactgcaagacgtaaccataggcatcaacttccattgggaacgtaaagaagttcaaagattcaaaggtgaactgaagattattgttgaagatgacagactgactgctatcaatataattcctattgaagattatctcaccagcgtgatttcatcagagatgagtgctacagcttctttggagctattaaaagcacatgccgttatttcccgaagctggctgcttaataagttgaaagttgcaaatgggaaattgaaagttattatgcacccagacaacacagccaactttgaactttcaactctcccctctcaacttattaaatggtacgaccatgaagcccacaaaaactttgatgtatgtgccgatgaccattgccagcgttatcaaggcattacacgcacctcaactccacaggcaattgaagctgtttttgctacacggggtgaagtacttatgtatgaaggagagatttgtgacgctcgtttctctaaatgttgcggcggcgctttcgaagaattccagaactgctgggagaatgtaaagcatccctatcttatcggtcaacgggatagtaaaacagaaacgcgacttcccgacctgacaaaagaagtggaagccgataaatggatacgtacttctcctgcggccttttgcaacacccataacaaacaagtgttgagtcaggtattgaataattatgaccaggaaacaacagacttttaccgttggagagtctgctactcccaacaagaactctcggaactgattcataaacgttcaggaatcgagttcggaaaaatcattgatttgattccggtcgaacggggaacttcaggacggctggtccgattgaaaatagtaggaacgttacgcactctcatcatcggcaaagagttggagatccgtcgtaccctatcatcttcccacttatatagctccgctttcgttgtggacaaagaatacaaagaagatgaaaaagaaatcccttcccggtttatcctcacgggatccggctggggacatggcgtgggactttgccagatcggtgccgccgtaatgggggaacaaggctataaatacaaagaaatactatcccactactaccccggtagtgcgattgagcaacaatataaataggacccaatgaataccatgacaacgccaaccctgaaaagagacccttggagctggattccaaccctctactttgcagaaggacttccctatgtagcagtaatgacaatcgctgtcatcatgtataaacgtctggggttatcgaatacagaaatagctctttacacctcctggctttacctgccgtggactatcaagcccttatggagcccgttcgttgatctgattaaaacgaaacgagcctggattattgccatgcaaggatttatctcagccggatttgccggtattgcctttttcatcccgacaacacactacgtacaattcaccctggcttttttctggctgctggcattcagttccgccactcatgacattgcagcagacggtttttatatgctcggactcaataacaaggaacaatccttctttgtaggtcttcggaatacgttctaccggtttgccagtattttcggtcaaggagttcttgtgatgttggcgggttggctggaaacattacaaaataatgtacctctggcatggagcattactttctatcttatggcaggactatttttggcactcactatctatcatcgtttcatgctcccttatcccgattccgacgtcaaacgggaaggcctgacacccagcaaactgctagaagacttctttaaaacctttgtctcttttttccagaagaaacatataggtcttatgttctttttcctgctcacctaccgactgggcgaatctcaattagccaaaatcgcctcacctttccttctggatagtatcgaaaaaggaggattggctctatctacaacaacagtcggaatgatttatggtaccataggcgttgcagctctcttattcggtggaatcatcagcggtttgctcgtttcccaagacggattcaaaaaatggatattacccatggcattagcgattaatctccccgacctgttatatatctggttggcagcagcaaccccagataacctcattctaatatctatttgtgtcgccattgagcagctaggctacggttttggtttcactgcctatatgctttatctgatttatattgcggaaggcgagcacaagactgctcattatgctatcggaaccggatttatggcattgggcatgatgattccgggaatgcccgcaggctggatacaggaacacatcggatataccagtttctttatctgggtctgtatttgcaccatacccggcattatagcctcattgatgattcgcaatcggctggatgattctttcggtaagaaacaataaacaatttacttaataacttaacacattaacaagtaacagtcatgaatgtaacaagtaacaaacgtctgttggcacttgatgtaatgcgaggcattactatcgcaggaatgattctggtgaataatccgggttcatggggatatgtatattcccctcttaaacatgctcaatggaacggtctcacccccacagacctgatttttcctttctttatgtttatcatgggaatctctacttacatttcactcagaaagtataacttcacgttcagtacccccgcagccctgaaaattatcaaaagaacgattgtcattttccttatcgggatagccatcaactggtttgccttgctttgctactatcacgacccgcttccctttgcccaaatccgggttctgggagtgatgcaacggcttgccctttgctacggagcatccgcattaattgccttgcttattaaacacaagtatatcccttatctgatcgtcgccttattagtgggttacttcatactcctcatcaccggcaacggctttgcctacaacgaaacgaacattctttccattgtagaccgtagcatcctgggagatgcacacatgtatcaggacaatcacatcgacccggaaggacttctaagcactatcccttctattgcacacgtactgataggcttttgtgtcggcaaactactaatggaagtgaaagatatccgcgaaaaattggaacgtctctttcttatcggtacgattctcacttttgcaggtttcctgcttagctatggatgtccgttgaacaaaaagatatggtcgccgacttttgttctggtcacttgcggattaggttccagttttctggctttactcgtctggattatcgacataaaaggatacaagaaatggagccgtttcttcgaatccttcggagtaaatccgctctttatctatgtactggcagatgttctcgctatcctgctaggtgtcattaccgtcacatatcagggagaaaacacttccttgcagcaagtcttttatgccggtgtccttcagcccgttttcggtaatgaaagcggttcccttgcttatgccattctatttgtccttctcaactgggcaataggctatatattatataaaaagaaaatatacattaagatatgatacttattgcagatagcggttctaccaaaaccgattggtgcattgtattcaatggcaccctgattaaacgaattggaacgaaagggataaaccctttcttccaatcggaagaggaaatccaacaagagttaactgcctctctcctgccacagttaccggaagggacgataaactccgtttatttctacggtgcaggatgtacgcccgaaaaagctcccgtcctccgacgggcaattgccgacagcctgcccgtcataggaaatataaaagccaattcggatatgcttgccgccgcccgcggactatgtggacacgaagcaggcattgcctgtatcctcggcacgggttccaactcctgcttttacaatggcgaagagattataagtaacatttcacctcttggatttattctgggtgacgaaggaagcggcgcagtattaggtaaactgctggtaggcgatgtactgaaaaaccagcttccgtcaaccataaaagaggcttttttaaagcaattcgacctgacagtccccgaaatcatcgaccgggtttaccgtcagcctttcccgaaccgttttttggcaagcctctctcctttcctggctcaacacctggacgaacctgctatccgcacactcgtgctcaatagcttcattgctttccttcgcagaaatgtaatgcaatatgattacaagcaatatccggcacatttcatcggttctgttgcacattgttataaggatatattacaagaggcagcacagcaaacagggattcaagtcggtaaaatcctccaaagtccaatggaaggattaatccaatatcatcaaaaataatttctctatctacaattaattggtaaacagtaatttgtattatgcagataaccgaacaaccatcgctttacgatcacctggaaaagaaatccgtacgggaaatactggaagacatcaatcgtgaagatcaaaaggtagcatcagccgtacagaaagcaattccgcagattgagcaccttgtcaacctgattgtcccccgcatgagacaaggcggacgtatcttctatatgggggcagggacaagcggccgtttaggagtattggacgcttcggaggttccccctaccttcggaatgtctcccaattggattatcggactgatagcaggaggtgatacggccttgcgcaatcccgtagagggcgccgaagatgacacaaaccgtggttgggaagaattgaccgaacatcacatcaacaataaggataccgttatcggcattgccgcttccggcactactccttatgtaataggagctttacacgaagcacgcaaacaggggatcctgactggttgcatcactagtaatcccgattctcctatggcagcagaagcagatgttgccattgaaatgatcgtcggaccggaatatgtcacaggcagttcccggatgaaatccggcaccgggcaaaaaatgattctaaacatgatcagcacttctgtgatgatccaacttggacgggtgaaaggaaacaaaatggtgaacatgcaattgagcaatcaaaagttagtggaaagaggaacacggatgattatggaggaattaggattagaccacgatcatgcccaaaagttattattgcttcatggttcggtaaagaaagtaattgacgcaaacagccaatcatttcaccgaaatacaaagtctaattaacctataccgaattttaggagagggacaggaataaactgtatcatgctctctgttttgtaaattgatgaagaaagagagtgtccgaaaagtgaagtgcaccccaaaagttttttgtctaacttttggggtgcacttcataatagacgcaacacctgtttatctttattatactatataagattataattctacaatcttatctaactttacgttatagactaatgccgaataaggttgtaaagaaccgtcttcgctagtaccggagccatatccactctgataaggaatatacaaagtccataattcaccttctgtcatatgcatcaatgtatatgaccaacctgtaattaccccgtccaaagaaaatttggatggtgaatcgtagttgctaggtttaatcccattaaagttctgctgcaccacatctccgttaaaataagtcatacgataatatgcacttaccgtagaagtatatagtggttttttctgactgctattttcatccttactaatcttcttaacgtacaacatttgattattagtcggatctttgtaagcatgaagtttttccgggtcattatccggcaaagccttattctcagcgctgttatatacatttgcaatagaatcaatgaatgcctcactacgtgcctgccaattatcatagcgacccgcctcctctgtttcactacaagcagtaaacgtcagagccagcaatactaaagaaaataaatagatctttttactcattcgtcaaaggtttattgtaaagttttcaatagagaagtgatacttactctgtctgcaatgatattattcagttcagagatagccacacgttcttgctgcatggtatcgcggttacgcaatgtcacacagttatcttccaatgtctgatgatcgactgttacacagtacggggtaccgattgcatcctgacggcggtaacgcttgccgatgctatctttttcgtcatattggcaatggaaatggaacttcaggtcatcgatgatttcacgcgctttttcaggcagaccgtctttcttcaccaacggcataaccgccagtttcaccggagccaaagcagcaggcaatttcaaaacaacacggctttcaccattttccagttgttcttcgcaataagcggcgctcataatgctaaggaacatacggtctacaccgatagaagtttcaattacatacggagtatatgattcgttcagttcagggtcgaagtatttaatgctctttccggagaacttctcatgttgtgacaagtcgaagttggtacgggagtggataccttctacctctttgaagccaaacggcatcaggaattcgatgtcagttgcagcatttgcataatgcgccaatttatcgtgatcatgataacgatagcttgcatcgccgaagcccagcgccttatgccatttcagacggatttctttccatttcttgaaccagtcaagttccgttcccggttttacgaagaactgcatttccatttgttcgaactcacgcatacggaagatgaactgacgggcaacgatctcgttacggaaagccttaccgatctgtgcaataccgaaaggaactttcatacgacctgttttctgcacattcagatagtttacgaaaataccttgtgccgtttccggacgaaggtaaatcttcatagaaccgtcggcagtagaacccatttcggtagagaacatcagattgaattgacgaacctctgtccagttcttagttcctgaaatcgggcatacgatttcttcatcaataataatctgacgaagttcctccagattattgtcgttcagtgcttttgcgaaacgggtatgaagagcatcacgttttgcctgatgttccaacacacgtccgttggtagaacggaattgagcctcatcaaagctttctccgaatcttttggcagctttcgctacttccttattgattttatcgtcatatttagccaactgatcttcaatcagtacgtcggcacgatagcgtttcttggaatctttgttgtcaatcaatgggtcattgaatgcatcaacgtgtccggaagccttccagatagtaggatgcataaatatggcagagtcgatcccgacaatgttttcgtgcaacagcaccatgctgtcccaccagtatttcttgatattattcttcaattcaacgcccatttgaccgtagtcatacacagcgcccagtccgtcgtagatatcgcttgaaggaaatacgaaaccgtactctttacagtgcgatactagtttcttaaaaacgtcttcttgtgccattttcttttctatatctattaatttgattttgcttttttcgtaaaaagtgccacaaagatagggatttatctcataaataagacaggtagggtattaatttatcttattcctgaacttcttcgccaaaacgggaaacgagaaaagaagataagcctcctcttttttgttcaaaaatataaagtcggaatatgttattatagtttatcacattaatagttgaaattaaaacatttcaatgaatgcgtttcaaataaatcaaaaagtgtttactctttattcataatcgattaaaccttttctaataaataaatgaatcgtttattataaacgtcaccctagtttattataaactttcgcacgcccttccaaagcgaatatatcaatattatgcaacaataaaggctgcgaatttataataaatccacagcctttattccccaaatcgtttttgtgagtctatttccatagacaccaaacgtctatgtcgtcaaattatagtaccattccaaggtacaagaagatcctctatgatagcaaaaagcaattctttttttcatttattccggtttttagctaaaagacaatagtcgattacaaatatacaatataaataagacgttgtcaagtaaatctgttattggcagagttaaataatgaaagaatgaatctttaaaaagttatgcatatcatttataaatgtctttattcaaagatataccaattaaatccttttgcgggtattctaattttcaacgagatagaatagtctctgtcaacagtataggtccgggctttgccatcctgttcttttacccgaactttatcatgcaaaccagtatagtataatggtacccgaatagtgcgttcgatgtcagttaaaagagggttatacacagccagaaagcctttctgttgaatgtcaggattaacatgcaggataccatcccagtctctgccatcagggcgacgtaaatgaacaatatcagaatctagaatacgacgatatttcttataaaaagcgacccaatgacttaccattttgcgagtatcctctgtatcatacagtcggggacctcgaaaacatgcctggactcccgccccgaatagattctgcaaacgaatctggtaatgctccaaatgttcgcaaagaggctcaatagtcgcagcttccccgcctccatgatattgtgtaagaggaacaaacataaagcccatagtcggagttttctgccaagttccatcatatatgttttggcgttcaataatttcctgatatgcacggggcaacgaccagtttgtttctacatatcccattggggttttgttggagccattgagaaaataccaatcgggaacattcaaatatatgccctgttcacgacaccaacgataaaagtcccgtatcacctcccattgcttccattgggaatccaaatagccgcgatgatgtttgtgttgtgtcgaagcacaaggatctccgggataagaaccgtcattctcaaatacccccatacccgtctgcgtaaagaatgagcgtaacttgccaaagtaagtatctccccatgaagaagcaagacaaggagattttccaaagcggcttccctcttcccgtgttgtagcaggttttcctgtctttctactgatagcggcatcttccgtcttggcgcctctgcttgccaatagcgaatatccgccgagtgctatacctttagagtgagcataagcattcagacgtttcatcatttccatatattccggagaattgttttctatattaaacccgctgccaaaagtcattattaccatttcaaaaccaacagcggcacattggtctatggcggccttaacagaagcttcatccgagcggcgaacgtgcataaaaataggattctcttgagtccagggtgccatcattctccaaaaacggcattccgctaacccgcggcgttcattatcagtggcatctctcagcatttcaaaagctgtgcatgaacggaaagtcattcccggagttatttcataatcaggaccaataggcgggcatacttctaaacgcgccggtttgtactgtccgtaataccgtattccggtagcttcatattccggatggtcgaacacccaacggactgccggattgtctttcatcgcttccatatcacctcccatagcataatcagtcactacaaagagctgtgtaaagcgatctatatattcacgaggcgcgtcagtctgtgcaggagatttccgataattacgagtgtaagtacccggttcctgagccaacatacgtatttcatgcggttcaccatagtgcactttgggagctgtttccgttaaagccagtatttcagatttaaaagaattcagaacaatcgaagattttccttgattttcaacttctatctgttttgacaggataggagccccatcatatagctcatagatcacttttaccgacacattccgtatcatttccggtgcacgtggggcagctttatatgtaaaaacaatccgcttgccgggagccggccatggatttttgttcgacagccattcttgtttgggacgatagggaaaacgttcgatcgtttctcccactgtatggctcacatacgtgaatgcagtgtcgcaacttatcatatcctcaataaaatcgctattcagaaaattttgaaccggttgtttataaagccctcctaccggatattccataccattaatggtcaatacagcttccggacggatagcacgcagctccgcattgccattcatcaaattgtcaaatgcaatcgttgcgacattaggagataatatgaatgtacgtgagagtagcccgttactaaggcacaattctttatcggtagttgtcactttggcttgataggatgatccgtcaatcaaccaatctttttgaagattcaatgcaagagaatattgtacttgtaatgcacacaatatcaccaggatgtgttttttaaggtgtttcatataactcaatatattaatagataaattcaaacataagcaaaaatacaggaggtgcataatttatatacacacaaatattgtaaaaaagtacggttttcaatctacatgaacaaaataagcacattttatggaggatttgaacacatttctactaaaaaagtctatcggcagaattaaatacacacaaagtcaactccgccaaccggtcaaataaatcaagaatatgactctttatcccattaacctgtatgttcagaaagcaaatccggtgcccgctaaaagattaatgaagctgtcagtatcataaaaaacgtgagttcttttcgtcctcatatgaatttatttcgtatttttgcgtggacatccccttttttgatgttcaggaagattatttgttgtaaaagcaaagtgaagattgatttatgagtgacgaaattaacgagataccggaagaacattcagactacaaaccggcggacgcacgggacgaaaacgtaaaacaccagttaacaggcatgtatcagaattggtttctggactacgcctcatacgttattctggaacgtgccgtgccccatatcaacgacggtttgaaacctgtgcaacgccgtatcctgcattctatgaaacgtctggacgacgggcgatataacaaagtggcaaacattgtgggacacacgatgcagttccaccctcacggtgacgcttctatcggcgacgctctggtgcaactcggacagaaagatttgctaatcgactgtcagggtaactggggtaatatccttacgggagatggtgctgccgccccccgttatatcgaggcacgcctttccaagtttgcactggatgttgtcttcaatcccaagactaccgaatggaaattgtcttatgacggacgaaacaaggagccggtcactctccctgtgaaattcccgttattgctggcgcaaggagtggaaggtatcgccgtcgggctttcttccaagatactgccgcacaacttcaacgaactttgcgatgcctctatcaactacctccgtggagaagagttccaactatatcccgatttccagacgggtggttctatcgacgtagccaaatacaacgatggcgaacgtggcggagccgtaaaagtacgtgcgaaaatcaacaagctggacaacaaaacgcttgctatcacggaaatcccttacggaaaaaccacttcatccgtaatcgactctatcctgaaagctgttgacaagggaaaaatcaaaatccgcaaggtggatgacaatacggctgccaacgtagaaatactggtacacctcgcccccggcacttcgtcggacaaaacgattgatgcactatacgctttcaccgactgcgaagtgagcatctctcccaactgctgcgtgattgacgacagcaaacctcatttcctcaccgttagcaaagtcctgaaaaagtcggcagacaacacactggatttgctgaagcaggaactggaaatcaagaaaggggaaatcctggaagcactgcatttcgcttccctcgaaaagatatttatcgaagaacgtatctataaagacaaagagttcgagcagtccaaagatatggacgctgcctgcgaacacatcgacgaacggctgaccccgttctatccaagttttatccgtgaggtgaccaaggaggatatcctcaaactaatggaaatcaaaatgggacgtatcctgaagttcaactcggacaaagcggacgaactcattgctcggatgaaagaggatattgccgaaattgacgaccacctggcgcacatcgtcgactataccgtcaactggtatcagatgttgaagaacaaatacggcaagaacttccctcgtcgtaccgaactgcgtaacttcgacacgatcgaagctgccaaagtggtggaagccaacgaaaaactttacatcaaccgcgaagaaggatttatcggaacagccttgaagaaggacgagttcgtagccaactgctcggatatagacgacgtgattgtcttcttccgcgacgggaaatatatcgtcactccggtagccgacaagaaatttgtaggcaagaacatactttatgtcaatgtcttcaagaagaatgacaaacgtacaatctataatgtcacctaccgcgacggcaaggaaggcacaacctatatcaagcgttttgcagtcacttccgttgtccgcgaccgcgaatatgacgtcacgcaagggacaccggattcacgtatcacttatttcagtgccaacccgaacggggaagccgaaatcatcaaggtgactttaaaaccgaatccgcgtgtgcggcgtatcatcttcgagcgtgactttagtgagatcagtatcaagggacgacaagcacagggagttatcctgacccgcctgccggtacacaagatagccttgaaacagaaaggcggttccacactcggcggacgtaaggtatggtttgaccgtgatatcctccgtctcaattatgacggacgcggcgaatatctgggcgagttccagagcgacgataccatactcgttgtgctgaacaacggtgacttttacaccagcaacttcgacctgagcaatcactacgaagacaacgtaagtattgtcgagaaattcgactccaacaaggtatggactgccgcgctatatgatgccgaccagcagaattacccgtacctgaaacgtttctgcttcgaaggttccaaccgtaagcagaactatctgggcgaaaacaagaataaccgcctcatcctgctgaccgacgagttttatccccgcctggaagtgatattcggcggacacgacagtttccgagaaccattggaaatcgatgcggacgagtttattgctgtcaagggattcaaagctaaaggtaaacgtatcaccacttacacagtggagacgattaacgagctcgaaccgacccgcttccccgaaccggaacaggaaccgcaggaagaggcaagtgaagaacccgaaaatctggacccggacagtgacaaaagcgaaggggatattattgatgaaatcaccgggcagatgaaattattctgatgaagaaaaaactaatatacttggggctgacaggatgcatcctgttcgccctttgcacaaaattacaggcacagattgattccctgcagactcatcgttatgtaacacgtgccaccatgtacggcatcggttttaccaatgtgttcgacacctacctgtcaccacaggaatataagggaatcgacttccgcatttcccgcgaaacaatccgtatgacaaagttgttcgacggcaatgtttccgtacagaatttctttcaggcagatatcggctatacgcataaccgtgccgacaacaacaatacattctccggattagtcaactggaattacggcctgcattaccagttccgtctgacggagaactttaaattactggccggaggactgatagacgccaacggcggctttgtctacaatctccgtaacacgaacaatccggcttccgcaagggcatacgtcaatctggacgcttcaggaatggctatctggcatctcaaaatcaaacgctatccaatggtgttgcgctatcaagtgaaccttcctgtcatgggagttttgttctcaccgcactacgggcagtcttattacgagattttctcattgggcaatgccggcggagtgattaaattcacttctttgcacaaccagccttccctccggcaaatgctctcgattgacctgccgataggatataccaagatgcgtttcagctatctggctgatttgcaacaatacaaagtaaacaatatcaaaacacatacctactctcatgtattcatggtaggatttgtgaaagacctataccgaatccgaaataaaaaaggaacagcccctctgccttcatcggtaagggcctactaagagaacgaaagatttaatgttgaaatttcaaagagcgatagataagaagaatgaaaaataagattatacaattacttttactaatctgctgcctgccggcgctgaccggttgcatcagggaagaagagtacgccaatgatcccgtaggcaacttcgagcaactatggaagatcattgacgaacagtattgttttctggaggcaaaaggcattgactgggatgccgtacacgaaaaataccgaaaactggtggtaccgaccatgtccaacgatgatttgtttgaccttctgagtcagatgttatataccctgaaagacgggcacgtcaatctttcttccgccaaacgcacttctttctatgatgagtggtatcaggggtatgattggaattaccgggaagacattctttaccagacctatctgggcagtgccagcagcggttactacacagcagccggactgaaatataagatattcgacaataatataggatatatccgttatgagagtttcagtgcaggggtaggaaacggtaatctggatgaggttcttctctacctgtcaccttgcaacggattaatcattgatgtacgcgacaacggagggggaaacttgacaaactccacccgtatcgccgcccggttcaccaaccaaaagacgctgaccggatacattcagcacaagaccgggccgggacataatgatttctcccaaatggaaccgatttatctggaaccgtccaacagtatccggtggcagaaaaaggtagtgatattaaccaaccgtcgttgttacagcgcaacaaacgattttgtcaatgcgatgcgcagcatagaagatacagaaattatccagttgggcgaccggaccggaggtggttccggtcttccgttctcgtccgaactgccgaacggttggagcatccgcttctccgccagcccgcatttcgataagaacaaacagccgttggaagaaggtatcgcaccggatgttgctatcaatatgtctaaggaagaccaacttgagaataaagatacactgatagaaaaggcatttgagatactaaacgaataactttattgccgaataatttgtcaaatcagaaaatcttcctatctttgcaccgctaaacaaaaaagctacctgcggatgtggcgtaattggtagccgcgccagacttaggatctggtgccgtgaggcgtgtaggttcgagtcctatcatccgcaccaaaataaactagaaagccttcaagatacattcttggaggctttttaattgcttacaatatgaagaaacatcaactttgctgtattggtcacatcacattagataaagtagttacccctcaaagcactgtttatatgccgggaggaaccgctttttactgttcacacgccattcgtcatttcaatgatatcgactatacactagtcacggcagttggtgcaacagaaatgaacgttgtaaaacagctacgtaaggtcggcattgacgtcactgcattgcccagccggcattccgtatatttcgagaacatctacgggaccaatcccgatgaccgtacccaacgtgtactggcaaaagctgatcctttcaccgcttcccaactccgtgagatagacgcggagatttaccacctcggctccctgctggccgacgacttctcactggaagtaatcaaggagctttccctaaaaggattgattgcagtagactcacaaggttacctgcgtgaagtacgtgacactcatgtatatccgacagactggaccgacaagcgggaagccttacgatatatccatttcctgaaagtcaacgaacacgaaatggaagtgctgaccggcctttccgatcctcacgaagccgcccggcggttgcatgaatggggagtaaaagaagtgttagttacattgggaagcatgggctcacttattttcaacgggacggactttttccgtatcccggcttataagcctgcgcaagtggtggacgcgacaggctgcggcgatacatatacaatcggctatctgtatcaacgggtatccggaaccggcattgaggaggcggggcgtttcgccgctgcgatgtcgacactgaaaatcgagaaatccggtcctttcaacggcaacaaagaagatgtcgtccactgcatagagacagcggaagaaatgttttaaggtcactattgctatttcacatcggttccttttgtgttaaaatcggacattcctgtattttccaaaatcttttttgcctttcgtttgttcactttgttactttcgccaaatagcggcagaaaaagacttcaacctaaatagtaacaaatggaaaaatttaatgcaatgaggactagacttttacaacatcttcagaagaaaaccacttggtttaagagcatagtggcgctcacttgcttattgcttacctctgcatctgcctttgcacaaacaaagacggtgacgggtacggtaacagacgctgctaatgaaccactaataggcgcatcggtgctcgtacaaggaacttccaccggaaccattacagacatggacggtaagtattcaatctctgtcaccccggacgacgtactggcattttcctatgtgggaatgacctcgcagagcgtcaaggtcggtgcgcagaccgttatcaacgtcaccctgaaagaagattcgcaagtgctagccgaaacggtagttatcggatatggtagtgctaagaaaagggacttgacaggttctatcaccaacatcaaaggagaagaacttgccaacaaacctgccatgaacccgctttcttccttacagggaaaagtggccggcgtgcaaatcgtaaactccggacgtgccggctccgacccggaaattcgtattcgcggtacaaactctatcaacggatataaacctttgtatatcgttgacggactattcaacgataacatcaacttcctcaacccggaggatatcgaatccatggagattctgaaagacccgtcttcactggcgatcttcggtgtccgtggtgctaacggtgtgattatcatcaccaccaaaaaagccaaagaaggacaaacactggtaaatataaacacctccttcggcttcaagaaagtagtagataaggtgaagctggtaaacggatcgcaattccgtgagttatacagcgagcagctcgccaatcaggaagacgccccgttcgacttcaccggctggaatgcaaataccgactggcaggatgaaatcttccagacagcttttatcaccaacaataatataagcattacgggagcttcgcccaaacatagtttctatctgggcgtaggttactcgtatgaacagggcaacatcgaacatgagaaattcagcaaagtgacgattaatgcaagtaacgactacaagattacggattatctgaaagtcggcttccagttcaacggggcacgtatgcttcccgccgactccaaacaagtactgaatgccctccgtgccaccccgatcgctccggtatataatgatgaatacggactatacagtgcactgccggaatttcagaaagcacagatcaacaatccaatggtagacgtcagtctgagagcaaacaccaccaaagccgagaactaccgggcgtccggtaatatctacggtgaagtggacttcctgaaacatttcaacttcaaagcgatgttctctatggactatgcttccaataacggacggacataccagcctatcgtcaaagtgtacgaccccactgtcagcgggaatatagccaccttgggaacaggcaaaaccgaggtcagccagttcaaggaaaatgaaacgaaagtacagagtgactatgtgttgacatatacgaacagcttcgacaatggcaaccataacctgactgctactgcaggtttcacgacttattacaattccctgagccgcttggacggagcacgcaaacaaggtgtaggtctggtgattcccaacgatccggacaaatggttcgtgagtatcggtgatgcagccactgccactaatggaagcacgcagtgggaacgcagcacactgtccatgcttgcacgtgttatctacaactataaaggcaaatacctgttcaacggttcgttccgtcgcgacggttcttccgctttttcttatacgggcaacgaatggcagaacttcttctctctgggaggcggctggctgatgtccgaagaagaattcatgaaagatatcaaatggctcgatatgttgaaaatcaaggcttcttacggtacgctgggtaatcagaacctagataaagcctaccctgccgagccgttactgagcaacgcttattccgccgtattcggcaaaccgtctatcatctatccgggctatcagcttgcctatctgcccaatccgaatctccgttgggaaaaagtggaagcttgggaagccggatttgaaacgaatcttctccgcaaccgactgcattttgaaggtgtttattatatgaagaatacgaaagacctgctggccgaagttcccggtatttccggaacaattccggggataggtaacttgggacagattcagaataaaggagtagaaatggctgtgacctggcgcgaccaaatcggcgaatggggatattctgtcagtgccaacctgaccaccatcaaaaatgaagtgaagagtctggttcaggaaggatactctatcatcgccggagacaagcagcaaagttatacaatggcaggctatccgatcggttacttctacggttataaggtagaaggcgtttatcagtcgcaagccgacatagacgcatcgcccaagaacacgctcgccaccgtcacccccggtgacttgaaattcgcagatgtcgacggaaacggagaaattactccggaagaccgtaccatgataggtaatccaaccccgaaagtaacttacggtttctccctcggagtgaactacaagaactggtcgttggggatcgacatgatgggacaaggcggtaacaagatattccgcacgtgggataactataacttcgcccagttcaactacctcgaacaacggctggaccgttggcacggggaaggtacttccaatacccaaccgttgctgaactccaagcactctatcaactacctgaattcggattattacatcgaaagcggcaacttcttccgtatccgtaacgtacaacttgcctatgcattcgacaagagcctgcttgccaaaatccgcctgcaagccctgaaagtgtatgtcaacatacaaaacttgaaaacatggaagcataacaccggatatactccggaactgggaggaaccgccaccgcattcggcgtagacaacggaagctatcccgtaccggcagtctatacgttcggtatcaacctgacattctaatggcaagatagtagcgtaggggcgaaagaggagaaaccatgcaggccccttgcgaaacttcagcaactttaatctttaaaactataattgtatgaaactagataaatatatattttcaacctttattgctgcggccgcactcgctttgggcagttgcagtgactttctggaccgcagtccgcaaggacagtttacagaagacgataatcccaatgcgctggtcaacggtaaaatctacaatgtctacacgatgatgcgtagctacgatatcaccgcaggcactaccgccctcgctatccactgtctccgttccgaagacgaagaaaagggaagtattgccagtgacgggtcggatgtagccgagatgtatgacgacttcaaatacacggcctccaatggtctgctaggtgcttattggggaaagaactacgccgttatctatcagtgtaacgacatcctcgacgccattgccgagaaagaaaccgccggacagaccgaagccgaagacatcatcaacaaaggtgaagcctctttcttccgtgcctattgctacttcaacctggtaagggcattcggcgaagtccctctggtgacttacaagatcaacgacgcttcggaagccaacattccgaaaaccaccgtcgataaaatctacgagcagattgatgccgacctgaaaaccgccgaggagtcactgccggaaacatggagtaccgagtacttgggacgactgacatggggagccgcccgttctttgcacgcacgtacatatatgatgcgtaacgactggaacaatatgtacactgcctccaccgatgtcatcaagaaagggctctacaacctgagaactccgtataatgaaatcttcaccgacgatggcgaaaatagcggcggttctatcttcgaactgcaatgtaccgctactgccgcccttcctcaaagcgatattatcggcagccaattctgcgaagtgcaaggtgtgcgcggagcggatcaatgggacttgggctggggttggcacatggcaaccgaacttatggcgcaagcctacgaaccgggcgacccgcgcaagaacgccaccctgctttacttccgcagatcggacagcgaaccgattactccggaaaataccaatgagccttacggcgaatctcccgtctctccggcaataggtgcttacttcaacaagaaagcctataccgaccctgccctgcgtaaagaatataccaataaaggatattgggtgaacatccgcctgatccgttatgcagatgtcttgctcatgggagccgaatccgccaacgagaagggtatctccggtgaggcaatcgactacctggaacaagtacgtgcacgtgccagaggcaccaacaccaacattcttcccaaagtgaccactaccgaccagggagaactgcgtgaagctatccgccacgaacgccgtgtggaactgggacttgagttcgaccgtttctacgacctcgtccgctggggcattgcaaaagaagtattgcaagctgccggcaagaattatcaggacaagaacgctttacttccattgcctcagactgaaatagacaagtccaaaggggtactggtgcaaaatcccgattaccaataaaacaaaatagaatataataatatgatatacaagaaactaagtttattaatcctgttctttgcgacaggactcctgaccgcatccgctcagaagtcgccacaagacatggatcgtttcatcgacgcattgatgaaaaaaatgaccaccgaagaaaagatcggtcagttgaaccttcccgtcacgggagagattactaccggacaatccaagagcagcgacatcgccggcaaaatcaagaaaggcgaagtgggaggactgttcaacctgaaaggggtggagaaaatacgtgaggtacagaaacaggctgtagaagagtcacgcctcggcattccgttgttgttcggcatggacgtgatccatggatacgaaacgatgttccctatccctctcggactctcctgtacatgggatatggcggctatcgaagaatccgcccgcattgcagccgtagaagccagcgccgacggtatctcatggacgttcagcccaatggtggatatttcgcgcgacccgcgttggggacgtgtatccgaaggtaacggtgaagacccgtttctgggagctatgattgccgaagccatggtgcgcggctatcagggcaaagatatgaaacgcaatgacgaaatcatggcttgcgtaaaacacttcgccctatacggagcaagtgaagccggacgtgactacaatacggtggacatgagccgccaacggatgttcaacgactatatgctgccttacgaagccgccgttgaagcaggcgtaggcagtgtcatggcatcattcaacgaggtggacggcattccggccactgccaacaaatggttaatgacagacatcctgcgcggtcagtggggattcaacggatttgtagtcaccgactataccggtatttccgaaatgatagaccacggcatcggcgacctccagacggtaacggcacgtgccttcaacgccggagtggatatggatatggtcagcgaaggttttgtaggtactctgaaaaaatccattcaggaaggcaaggtttctatggaaacattgaacaccgcctgccgccgcatcctggtagcgaaatacaaactggggttgttcgacaacccgtataaatattgcgacccgaaacgtccggcacgtgacatctttacgaaggcacaccgcgacgctgcccgcagaattgcggcagaaagtttcgtcctgctcaagaacgacagccccgacggaaatccgaacggcaaccctctgctgccttttaatcctaaaggcaacatcgccgtgataggcccgctagccaacagccgtgccaatatgcccggaacatggagcgtagccgccgtgctcgaccgttgcccatcactggtggaaggcttgaaagagatgactgccggaaaagcgaatatcatgtatgccaaaggcagcaacctgattagtgacgccgcctacgaagaacgcgccaccatgttcggccgttcactgaaccgcgacaaccggaccgaccagcaattgctggacgaagccttgaatgtagcccgccgctcggacatcatcatcgcagccttgggcgaatcgtcagaaatgagcggggaaagcagcagccgcaccaacttggacctccccgacgtacaacaaaacctgttgaaagaattactgaaaaccggaaagccggtagtactggtgttattcaccggtcgtccgcttacgctaaactgggaacaggaacacgtgcccgctattctgaatgtatggttcggaggcagcgaagcggcctacgctatcggcgacgccctcttcggttatgtcaacccgggcggcaaactgacgatgactttcccgaagaacgtcggacagatccctctttattatgcacataagaacaccggacgcccgttgggacagggtaaatggttcgagaagttccgcagcaactatctcgatgtggataacgagccgctctatccgttcggttacggactttcttataccactttctcttacagcgatatcgacttgagccattccagcatggacatgaacggctcgctgaccgcagcagtgacagtcaccaacacgggcacatggcccggttcggaggtagtgcagctttatatccgcgacgtcgtcggcagcagtacccgtccggtgaaagagctgaaaggttttcagaagatatttctcgaaccgggtgaaatgaagattgtccgtttcaagattgctccggaaatgttgcgatattacaattatgacctgcaactggtagcggagccgggagatttcgaagtgatgatcggtaccaacagccgggatgtgaaaacagcaagattcactttgaactaaagtaaccgtgaaaagtcggtagtaactcaattctcctccttcgggaaggaggagtacccgtagggggaggtggtaggtgaatacgtaagtctattattatcagcattgtgcatccacctaccaccccggctttcagccacccctccttccccgaagggaatgaagatacaaccgcctcttgccccttttacaaaccaaacttaccttttacaaaccaaacttaatagtatcagttatgaaaaataaacatcatagaaaaatcacaacaggaagcctactccctctcatgctactgtttctatccacccttaccctgaccttccaaagttgtaagggaaaaagcagcagcaacctcaccgccgccaccgactcactatcggatgacgccttaatggataccgttcagcgaaggactttcctttatttctgggaaggtgcagaacccaacagcggtcttgcccccgaacgttatcacgtagacggcgtatatccgcagaatgatgccaacgtggtcacctccggcggcagcggcttcggcatcatggctatccttgccggtatagaccgcggctacgtcacccgcgaagaaggattggcacgcatggaacgtatcgtctccttcctcgaaaaggccgaccgttttcacggagcttacccacactggtggtatggtgataccggaaaagtgaagccgttcggtcagaaagacaacggcggcgacctcgtagaaaccgccttcctgatgcagggccttctagccgtgcaccaatactacgcaaacggtaatgacaaagaaaaggccatagcccaacgtatcgaccgcctctggcgggaggtagactgggactggtaccgcaaaggcggacaaaacgttctttattggcattggagtcctacttacggctgggaaatggatttccccatacatggctacaacgaatgcatgattatgtatatccttgccgccgcttcaccgacgcacggagtacctgccgctgtctatcatgacggttgggcacagaacggagcgattgtttccccgcacaaggtggaaggtatagaattgcatctccgctaccagggcacggaagccggaccgcttttctgggcacaatattctttcctcggcctcgaccccgtcggactgaaagacgaatactgtcccagctacttccacgaaatgcgtaacctgacgctagtcaaccgcgcctactgtatccgcaaccccaaacactataaaggtttcgggccggactgctgggggctgaccgccagttactccgtcgacggatacgccgcccactcgccgaacgaggaggacgacaaaggggtcatctcccccaccgccgcactttcgtctatcgtctacaccccagaatattctctgcaagtgatgcgccacctatataatatgggagacaaagtattcggtcctttcggattctacgacgctttcagcgaaacggacaactggtatccgcaacgctatctggctatcgaccaaggacctatcgccgtcatgatcgagaattaccggacaggcctgttatggaaactctttatgagccaccccgacgtacaagccggattgacgaaactcggttttaataccaacaaacaggatgtgagacaacaataaggaatcacggtcggtggaagtggtcttactgaccacctccgccagcggcgtttcctccgcctccgccgcctttcacatcatcattactaatgcttcgggcagctttcttcacgctggctttcagttctccgatccggtagctgacactgactccaaagctacggctcggccatttgctgctgctctttgacacgaagttggctccttccgtatggttgttgtagctcctgtatttttcaaagatgttattacaatataagttcacagacaaacggtcctctttcaggaacgagcggttcaggctaagaccataatattgataaccggacccctttccttgcagactgatatacggcgtacttccaccgccattcaggctcaaccgcaacttcaaaggaagcgtgtgctggatacccccgtagaaagaaccattccatccatagttgtgcaatccctgcgcctcacttttcatatctgtataatttccgcgtccgttcacataaatacgtgttttcggagaagcattccagttcagataaagggaaagaccggtattccggttcttgcctatattatcataggtgctgtataaagccccttgcggtgctatatgacctccgccaaagtcttccccgtcctcggcagtaatcaaacggctgattctctcgattccattattattaaaggagtgacgcaacgagacattcacgttaaacttagcactgaaactactgtaagccacatcgaacgcatgacttttctcactcttcaaatccggattaccctgactgataaacatcgggttctgatcgtcaaaataagggttcaggttccagatacccggacgccagatacgcatattataaccggcacgtatgttctgcgttttgccgatcttcatccccaaagagacggaaggcaccaagtcactgaaattggtatggaaattctctcccggaccgacaatatatttcacccgttgtatggtctgttcgtagcggagtcccggtttgaaagtaaagtccttatatctcaacgtatatccggcataggcggacaggatatggttcaaatgacggtaatcgctgctgcggtcctcgttgtatgcataatcattgctgcctcctgctgcctcgtaaaacttattatcactggagttccgccggaagatatacttcacgccggtttcaatcgtatgcaatttgccgatcggtgtcgtataatccacctgaaaggtctgttccatagtattcgtcttaccgtccgaatggtaattgtacaacttcagattttctatcagttcatcttttctttcatccggaagaatatcgagataagtgctataagaatcactcgtctgaggttgtgtgttcaccttataagaaagcgtaatcatccgttgtttgttcttcttggaagtacgctgataatcaacgtttccatttatggagaaccacgaactttttccatgattgtccgtccggtagctataagcaacatcctcgtaatttgctccgtacatcacggtactaccgtcgctgttactcttattactgctgccatacatcccgaaagccaccgtcagcaaccgtaacgtatcaatctcgtaactcgcctcaagattcccgtactggaaattcccctttgacttggaactgctgccggactcaagatatttctccgtatccgactcaaagttctcacgataactgtccgaatagccgcgcgggctgttattataattaaagttataattggcggaaagagttagtttcccctgtttcaccattgcataagcaccggtacctgccccgttattgttcgcgcttccacggaaagtagccgtatatccttcaaatccgctgcccactgtcacgatattcaggataccgcccactccttccgcatcatatttagctcccggtgaagtgataacctcaatatatttaatcgaattggcaggcatacttttcaacacttccttcgggttattgctcatcatgttattgggtttcccgttcacgtgtaccttgaaactgctgcttccgttcacctgtatattatcttccccgtccaccgtcaccaaaggaactttacgcaacatttccaatatactgttggacttggaatcgggatcatcctcaatattatactctatcttatcgacatctacctttaccagaggcttttgtgccacgacttccacccctttcagctcattgttggcttccgccgagagcattgttcccaaatcgaccactttagttgacgatttcaacgtaaattccttcaccacaggcgctttacctatcgaagaaatactgattacataatctcctgccggcacattcagcttctcctgaaatttaccgttcgcaccggtcaccgccattttcagcgctttctccggagcacttttctttgtaattctgattgtagcatacggttccccttcctgcgtcaaagaatccagaagcacacctttgattgtataagaaggagccacggatttttgcgcccaccccgccacagatgtagtgaacacgaatagtaatagtagcaacagtctgtgtttcataactagaatgatttagttcttattttattagacgtgcaacatttcggaatgttgcaaatttgggggataaaagtaggtggtttcccaacagttacgaaacattcggagttaagaaagtaaaaagaatagataaaaaatattatacgctctatttatttcagccccgtccaatgcttcacgcctgacaacaactgcttcaaattgttccataatctatctacccaactgatatgaaaaagcttttcgtatttcgtaagcaccttcgcacagtcctgcatccgttcgccttgtcttttcatggctatctgtatctcattcattcgagcgattttttccctctgcaacagcagttccttatcctgagcacctataatttcggcaagtagaaatatggaaataaatacaagaaattccgtatattccaactactctctacaaagggaaaaatgcaaattctctttcaacctatcaccacccttctgaaaccctttacagatcgtacttacagaacggtgataggttgtcagtaacctatcaccttacctatcacctatcaccgcccaatttgataaatgcctcttgtaaacaagagtaccactcagaggtaacttccgtttcatgccttgttacaatttgtttcaaggcgaagaaactttagtttcaagctgccggaactaaagtttcaagctattgaaaccagagtttcaaggtgcagaaactagagtttctcaccgatgaaaccgatcgtttccccgtatggaacaggcagcaaaaaggcatataaaacttaaccaagttttagtgataaataaatacgaaagagtttgcccgaccggattataaagcctacctttatcagcctttaataaaaaaggaataaataataaacacacttgacatgaaacttactttggtgcgggacaacggcgggacattaaccatgcgaacgctagatattaccctacaaatagaagcgatgaagcatgaaacgaaagcccgcccgatcagtaatctacggacaagcatacgtcacgcatcaccggactgcaaactagaagaagcgcaaaaactgacgaaagtcatccctgccgccaacttccgcaaaacaaccaacgggacgcaaatgaccgcatacaacggcatcgtgcaaatagaagtaaaccacctggcaaacaggacggaagtaaaccgcgtgaaacaggaagcggcagaactcactcaaaccctcgcagccttcatgggttccagcggacactccgtaaaaatatggctgcgtttcacacgcccggacaaatcactacccaaaagccgggaagaagcggaaatattccaagctcacgcttacagaaaagccgtcggcctgtgtcaaccggcactctcctatgccatcgaacttaaaaaaccgacattggatcaattctgccggcaaacctacgatccggaactttattacaatcccgactctaccgtcatttatatgcgccaaccattagaaatgccgtcggacaccacctacaaagaaaccgtgcaagcggaaaactccccattcaaacggctgattccgggatacgacagtttcgacaccttatccgccctcttcgaggtcgccctgaataaggcttaccgttcattaagcgaacttcatcccaacgtacatctccattcggacgatgacctcaagcctctcttagtgcaacttgcggaaaactgctttcagtcaggcataccggaagaggaaaccgcccgttgggccattgcacacttctacacccaaaagaaggaattcctgatccgccaaaccgtacaaaatgtatatctgaacgccaaaggtttcgggaaaaagtcccccttatcagccgaacaggaactggaactccggacagaagaatttatgcaacgccgatacgagtttcgttacaacacgatgacaaccgtcaccgaatatcgcgaacgaaacacgttctgtttttgcttccgtccggtcaccaaccgcacgcgcaacagcatcgccatgaacgcacgactcgaaggactcaacctttgggacagggatgttgcccgttatctggactccgaccgtattccggttttcaaccctatcgaagatttccttttcggcgtggatatccgttgggacggtcgcgaccgcatccgcgagcttgcttcccgtgttccttgcaacaacatccactggcctgatctgttttatcgctggttcctgaatatggtggctcattggcgccacactgaccgcaactacgcaaattgcacggtaccgttgttagtcggtccgcaagcttaccggaaatccactttctgccggaatctgctaccgaccgaattgcaaccctactacaccgaccgcattgacttcagcaacaaaagggatgccgaactatctctcaaccgtttcgcactcatcaacatggacgagttcgaccaaaacagggagagtcaacaggctttcctgaaacatatcattcaaaaaccggtagtcaacacccgccgtcctcacggtgtagcgacacaggagttgcgccgctatgcctcattcatcggcacgagcaatcacaaggatttactgaccgacacttccggcagccgacgttatatcgtcatcgccgtaaccggtccgatcgattgttctcctatcgactatgaacaactttacgcacaagccatacacgatatttacaaaggagaacgttattggttcgatgccgaagatgaaaaggttatgaccgaaagcaatcaggagtttcaagtgatccccattgcagagcaattattccaccaatatttccgagctgcccgggaagatgaggaagaatacgagttacttctcgccatcgagatactggaacaggtgcaacatgatagtagaatccgcgtttccaattgcaacattatccagtttggaagaatattgcagaggaatcaagtgccttccatacacgccaagcgcggcaatgtctataaagttgtccgaatcaagccgaaaagagcataaatatacaattatcggtacggtgacaggtgaaggatacggtgataggttaacgacaacctatcaccgttctgtaagtacgatctgtaaagggtttcagaagggtggtgataggttgaaagaggaattggaaaaatcaataggaattgcgaacagtgcccaatagtcactattcttcagcaatgacccagtctccgatagttcttgtcgtactgtcgaagttgactcctatctttacaacacttcgatgatccggctgataaggtatagcatatcctttactgtttatttgttccaacgcttcttccggtgtaccatctaccttgaactcaaagacataaatagcatcatgtaattttacaactacgtcagcccgtccgatagcactttttacttccacatccacgtattggcccatcaagcggaataaaagatagaagatagtctgataatgtttttcctgcttattctccagatcattgggaatcgaagcgaagaaagcccttattctctccagacattcaaccagttttccagcacgcaagtctttgataaaagaaaccacataaaacgtattttcacgtgccggcaaatgtacgtaggcgggcataagagactcgataaatcctttccgcacttctttgttgggataagccaaagtataaagttggaattccgaatcgtagcccttgatagtaagatagccactttgataaagcacagggagaggatcagtgataacacttgtaggagcatcaaactgttcggcagtagccgtagtcccatccaattcgcgaatatcgaaattactctgctgcaatatgtttatcaagaaagtaggtgttccggtagaaaaccagaaattagcatactttttttgagcaaatgcgttgaacaagctaaatggattgtaaatatcttcactatgttcactaaaatgatacccgtcatactgctgtttcaagtgcaaacaggcctcctcataggtttcgccattagcctgtgccatcatctcaatatctgctttcagttgcgtacgtaattcctgctcggtaataccacaaattgcgctataatcatcccgcatgctgatattctgcaaattattcagttcactgaaaatactcatttgactgaatttgctgattcccgtcaagaaaaggaaacgaagatattctccttgtgcctttaaaggactaaagaatttccgcatttcttcacgtaattcattttgcagttccggcaaatggttactgtctaataaaggtgcatcatattcgtcaataagcactactacctgcaaaccggtttgctgatatgctctttttattatcccggaaaaacgggctgcatagccctcctcttccggagcgctcccataaattcgctcccactcacaaagttgaagattcaaacgttcgttaagatcagccatagtggtatatttcgtcatgctgaaatctatgtgcagcaccggatagacattccattctttctccaaacgttccattgccaatccttggaacaagtcttttcttccccgaaaataagcgtccagagtggaaaccagcaaacttttcccgaagcggcggggacgacttaaaaaataaaccttattggtattagccaaccgatatatcaactccgtcttgtcaacgtatacgttgttattattacgcaagtcttcaaaattctgtatccctatcgggtatattctaaaagtattattcataatgcctatcctctttaaaatgaaatatagacaaatataggtattaaaagacaaacatcaaacagtactatacattttctcaaattttatcggcatttacaaccataagacaggaaggacacccgactattatctcataacaatacccgaaccattgctattattttacataagcacacatttatattcctacagagttgtaaaaagcagttattctttttagtattattacaaaccttcctatttatttttttattttttattaacccctacatactgttacactccttaacagtatcaacttgtaaagctgtaactcaaatttaaccttattgtaacacaaaaatagtggcacaaagctttgttagtttcgtaaaataaaatatctttgtttgctaattacttaaatcgaaacgtatgataacaaacaattcacaagaaatattaactatttatttaaaaacgctaatgaaaaatctaacttttctcaaactgttcgttacgacgatgtttgtaatggctacagcattatttgcaggttgcgttgacgataacgacgacactgaagctccacgtttggaggtttctccaaaaacgttagtatttgataccgacggaaccccggtagagggaagtcaatcttattttgaaatttcagcaaaccgccactggacagcaactgtactggacgataaaacctgggtgacactttccaaaatggaaggtgacggttctgacaaagttcaggtgagtatccccgaaggtattacagacgaagcgaaagtcctgattcagatttctaacaaggtaggagtgctgatgaaagaggaagttacgattagaagcggaaacattgttccgaaagttgctatttataaagaaacattcggaactgcagaacaaatagataaacaatggcctctggtcgctgacttcaatggttgggtcaaatcaggggaaggttcaaccaatgtaagttatgaaagctcaggcaatgtatctttacgcgaatccggaaaactaagtgcaggatatgaaggtgcttccggtaatgccaaagtgttctttggaactaagagcccaatcttcataattaaagagattacattgaagcctgaccagacaaacctcaagctaggatttggagcaagctattccaagagtataaacggaggaaattatgacaatacatttaagcccgaaagtttccatttctacctaagtaaggatggcataacttggtcaagcgctatccaatatgattacaagcaggcagacgaattctgggtttatgtaacttctaactttacactgaaacaagcagtgaatactctttatattaagtttgctgcggatattgagtcaggttttgcaatagacgatgtaaaactctccaccggcaatggcggacaagaaattgatttaggaaatactgatcctgctgtttctactgccgaagcaactcaagtaaatggcacatctgcaactcttggcggttcagtcgttaacatggacgttgcttctgcaacagaagtcggtgtacaatatacagaatacaccggagatgttacaaatattgattgggcaaatgtagctaaaacaaaagctcaagaaaaagtttctccttggacagtagcagtaacaggactcacaagtggaagccaatatgcagttcgtgcatacgcaacaacttcaaccggagatatttacggttctgtagaaaccttcactgctagtgctccggaagctataagcattgcagatctggttacaaagataaaagcaacgacagaagtaactcctattgataatgactatataattcaaggtattatctgtggcgacccggaagcacaaaactgctcatatggtacattatacgtaatgaccaaaggtgctactaccgccggcaatgcacttactctttacaatacgactatcaagcctgagacttattctctcggtgatgagataaaagttacactgcgcaaagagagtgcgaaaatgcaagtatataacagtgctccacaaatcagtggcttcgatgctgcagaagttgaaaagatatcttccggcaataatgttcagcctgttactattaccgtagataaacttctagactttgcttgtatgcctgtaaaaatagaaaatgtaactattgaaacggcaggcatttggaaaacagaggtcgataaggcttcgactcatactttcaaggctaacggaagtgatttaactgtatatataaataaaggtgcaagtagctttaataatgtagcatatatagctaaagaaaacggttcacttacaggtatagctgctgcctataaaactagtgcacaacttctaccccgtaatttggaagatgttaaagagttcgaagcaacaggaccgacaataacgtcagtaactcctacatcattaagtttccccgctgaaggtggtactaaagaaattgatgttactgtagcaaattcagagtctccaacttttaaactcagtggattaacaggtgacatagtatcagcaacagttgaaggaacaaaaatcactgttaaagccaaccctaatcctaatgctactacaaattctcaaactttgacgatttcattagttggtggaaatgaagtagaagtaccaatcaccgttgccggtaagccttcaggaaatgagactattatcagtttggatttaacaaaagcagagaattaccccgctgattttccaacctctaagcttgttgataccaaaacttatacttttggaagctatgaatatacatttgcaggttcatccggtaatggatattatagagcaaaatctggtagcgattattacacaattattggacaaaaaggagcttatatagaattaccagccattacagataaaaagttagtaaaggttactgcaacaacccgttccaatgcttctaaagctgtaacagtaggaatcgcagatgaatcaaatgtagatgtggtaggtggagcagctgttttatggaatcaggaatcaggaatggattacacatataatttatcagaaacggctgttaataccaaatatagaatttatgtcgggaatgcaaaaaatgctcaattcgttaagttagtacttatttacgaataatttttttctaataatattctcatggaaaggctaaatagcccttccatgagtttacccaaatgactattaagtaaaattcaaatgacatcacctcccaaatactacgcagcagcaataaagtccgtattctttacggtgctgatactgtgtgcatttgcgtgtagcaataacgacgacccggtatccccgaccgaagacggagaagcatattggaaaatatcttcgaccgtgaaatcagtttccggatcatcagcaatcattctatccggtaaaaccggtacggaatggcacgcagaagtgaccgaaggaacagaatggtgttctttcagtagtaaagattataatataacgaccaaaagtggacagatagcagatggactcaatgtactatacgtatattataagaccaattctggaaaaactcaacgaagagcacaactaacgttgcgttttgcagagaatactcaaaagacttttgatctggtacagctagcagaatcccaagagaatctgccggcgtttaactcatgggctgagctacctactaaagtagaaaacactaactatcaatatgttactcactatggactcttaaacaatcaaacaattcgtaactattcgatttgtttcgataaaactaagaaagccgctttatgggtagcatatccgatacatgacgcctacttaagaaagaatgtagaacgtaccaatcgttgggctttcgaccctattgttcctcaaagtttccaggcaaattgtgtagagcattcttataaaggtagttatgaccgtggccatcagatagcatctgccgaccgcgtgtgtacagatgaaatgaatgcgcagacattctatatgtcgaatatgacaccacagcttggttccctgaaccaacagatgtgggcgactcttgaaggaaaagtccgcagttacagttgtagtgatacattgtatgtagtgaccggagcttatttcggtcccggagcaactacaaccacagacggcgtaggtagttccgtacccgttcctacaaactatttcaaagtactgctacgcacaaaaagcggttctacgaataaaaaggtgcaggattgctcacccaacgaattaatatctattggtttctgggtagaacaaaaaggctatggaaattctataccgaaaagtatttgcacaacagtagctgatattgaagaaaaaacaggttttacattcttccccaaagtagatagttctgtgaagcaacagatggatctcgctcaatggggaataaaatgagatacaagcttatgaagaaacaattattttgcaccatattctttgtactgctgatttccgtttgttttggtcagaaaccatacaaagtggtattctataatctcgaaaacttcttcgatacgatcaatgatcccgaagttaaagatgacgagtttacccccgaaggaccccaaaaatggaatacagccaagtataataaaaagcttggcaatatcgaacgagtattgttcggtatggcagctatcgacaaagagtatccaatcgttatcggagtatcggaagtagaaaaccggaacgtactggaagacattgtagctacctccaagctggcaccgggtaattatcggatctcacatttcgattcacccgaagcccgtggagtagacgtagctttcctctaccgtccggatgtattcaaattggaaggacaatatcctgtaaagaccgtcattccttcattgccggacttcaaaactcgcgatatcctgactatgtggggaaccatagaagacgaaccgttcttctttatggtagctcactggccctctcgtctgggaggaaaagatgtttcagagttcaaacgtattgcggtcggacgccagatgcgcagcatcgcagactctgtactgcaggccaacccggcaactaaaatagtgatgatgggtgacttcaatgatgatccgacagacaaaagtataaccgaagggttaggagctaaattaaaaatgaaagatttgtctgccggtgatttatacgccccgtatgccgatatgctgaaagctggttacggtacattagcttacggtgatgcgtggaacatatttgataatattgttatatctgaaaatcttgccaaaggatctaccggaaaactgaaaatacaaaaagctcccggatcaaaattctacggcaatatcttcaaacaacattatatgatacaaaaagagggacaatacaaggggtatccactacgtacctatgtcggaaataatttccaaggtggattcagcgaccatttccctgtatatatctatataagcaaataaaactgaaatacttatgaaaataaagagttttctaatcatggtattatctttgatttcgctgactgtcgctgcacagaacggcggaatcaagggtaaagtcgtatcacgtgccacgcgtacggctattgacggtgtgaaagtcactttaacaccgggcaacgtcacaacgacaactgacgaaaaaggtaacttcatatttgagaatttgaataaaggtgaatattcactggcttttgaagcggcagaatatgagccattgtccattgcggtccgggtagacaaactgataagggacattaacaatgtagtgttagtacccgacaatcaatctcctactgtggacgatgctatttttgcagaatttgatacggagactttggacgatgcccaatcactgccttcgtcactgtcggcatccaaagatgtattcaacaacatcgcttcctacaaattcagcgagatgcgtttcaaccttcgcggatacgactcacgctatactgatgtatacttgaacggtatcctgttcaatgatgcactgaccggatattctccttggtcattatggagcgggttaaacgacgctacccgtaatcaggaagttacttcaggattgaatatgggagaaatgggtattggtagcctcggcggtacaaccaacatcaatacgcgtccttcacaaatgcgtaaaggattccgtgccagtcttgtaaatggcaactcaacataccgtttccgtggtatggtgacgtatgcctcaggactgcaagataatggttggtcatacgccttctccgtttcaacccgacagggaggtaactcttatgctcgtggtgtatattacaatgcattcggatatttcgctgccgtagaaaaacaattcaacgaccaacaccgtttggctttgagcgtattaggtgctccgacagaaagaggtactcaacaagctgccactcaggaagtgtatgatctagtcggaaacaactattacaacccgaactggggttggcaaagcggtaaacgccgtaatgcacgtgtacgtaattatcacgagcctatcgccgtattgaattacacttatgacatcaacgaccgttcacaactgaacgtggctacttccgtacgcttcggagagaacggttattcggcacttacctggtatgccggtcccgacccacgccccgactattacagatatttgcccagctactctaacgggactacttacggtgcctggttagatgaagcatggcgtgccaatacggataatatccggcacattaattggggacaactgtatgacatcaaccgtaatcaggaagaaaatgcaacgtatggtccgggacaccgttctatcaatatgatagaagaacgccataccgaccagttggactggaacttctatacacagttctctcatacgttccgcaataattccagaataaacggaggagtaaatttacgccgtaaccgtacggagtattatagcgaagtgaaggacctgctcggtggcgattactgggtagacatcgacaaatttgccgaacgtgacatgggcggattaaatccgattccttatcagaacgacatggaatattatgaaaaatacggtcatgcacgcgctgccaaaaaaggagataaatacggatatgattactacggaaatgtactcaacgcacgcgcatgggctcagtatgaaatgagtttcggcaaactgggtgtcaacctgggcggcgagatcggtcatgcttctttatggcgtcacgggttatggaagaaaggtttgttcctggatgactctcaaggcgactctaagaaacttaattatctgacttataaattaaaagccaacttcagctataaattctcggcagcgcactctatcgaggctaatatcatgtatatgcaagattcgccggaatttcagtccgcatttgtatcaccgcgtacacgtaacgccgttactccgggactttccgcagaaaaagtattcggtgtagacggttcctataatttccgtttaggagaacttagggcacgtgtatccggctattataccaagtttatgaatcagaacaaggttctttcttactatgacgacgtagaagccactttctccaactttgcgatgagcggcattgacaaacgtcattttggtgtggaggttgctgcttctattccgctcgacgccggattctacctgaacggtgcacttagctggggacaatatacatacgattcgaatcccaactacgttcagatacaggataatagtggtgagatcaaaaacgaaggtaaggtatactggaaaaacttccgcgtagaaagtactccgcagaaagcaatgaatatcggtttgtcttatcgtggtcccaagaatatctatgcttcactggatttgaattattacagcaatatgtacatatccatgagtccgctgtatcgtacagatgcggtattgactccgggtatgacaaaagaagatgttgcagaactccgtagccaagagaaattcaactctgcctatgtagtaaatgccagcattggtaagaactggtttatcaagcgccagtacactcttggattcagcctggaaatgaagaatcttctcaacgaccaggacatcaagaccggtggttacgaacaggttcgtttgttgaagaacaaagatacaagttaccagacttatcagccatttgactccaaatatttctatatgtttggttcgacttactatctgaatctttatttccgcttctaatctgtaacgaataaaaatgagaactatgagcaaattattaaaaatatgtatggttgtagctgctgtactcagttttaccggttgctacaatgactttgatgatcctgcaccggctaaagtctggacagaggcagatttcaacaaagaccaaatcattacaatcaaacagttgaaagatatatattatgccaaatatgctccgggatcaactgccggacttggcaaatatgtagaaatcacagaggattatgtaatccgtggtaaagtaatatcaagcgaccaggccgggaacgtttataaatctctttatatctatgacgagacttcccaatccggcatcgaactaaagctaatggtcagcaactatgtgtattatcacatgggacagactatttatgtgaagaccaaaggaatggctctcggcaactaccggtatatgattagtctcggtatgccgcctacggaagcggatattgagaaaaactatgcaaaccgcaatctggaaaaccaactgttgataaacgaacatatctgcccgggtgctatgggagaactgacggagaatgatgttttagttattactccaagcaactatgaaacagcactcaacgacgatgcgctgggacgcctggttcgtttcgaaggattaacctataaagaaggtacatccggtaacaacttctatccttcctatctggaggctatttatgagaatggtaaaaccgaggctacatacactagcaagtcttatatatccgaaggattaacacccacgtatgcatatagctataataaccaacgttattatggttcggcatggttctcttatggcggtacaaccaccgaagataagggtaactacattgtacgtgtaagcggatattcaaacttcgccctacaaccattgcccgaagccggtgcaacgggagatataacagccatttatacaaaatactcttccagttcaggcggtttcatcacttaccagttactggtgaacagttttaatgacattaatttctaagtataagatacacattaaacccaaaaggagaaaacgatcattgttttctccttttttcattttattattccgtactaccgtaagtatctttcttaaagatagaagaacagcaacaacacaaaattacaggcaatcactaccccgaatccccctaaaatccagggacggagcttacttcccttcccggcgaagaacaaagcatagaacatattcaccattatattactgatgatagcctgcatactgcaagcagtaataatcagtgcggcaacgctaccggtattttgcaacaagttcaagataaaaggagtaatatcactaaagccggatacaaaagaaagcagattcaatccacctgtacctgcgtagactaacgtataatgagtcagcacagtaaagattacaaataatacggcaaagattagggcaaccttaaattccagcgggttactgctatcatcatcttccggttcggcatccgaatctttaggacgtttctgccgggaatgaataaaccaccctacagccgcagctatcaccgacataatcagcaagtacggataaatagactggaaaatctcccggctaaaaatcagtatcagtatcataaaacgcaggaacatcatactgacagcaaacagcatggcggcaacatagtcggtagcttcctgctccgacgctttccgacttttacgggcaagtaccgagatcgtagccgtactgctatacagccctccgataatgccggataccaaagtgcctgactcatggaatacatatcttttcagcagataagacagatacgagatgccggataccacaaccgttgccagccaaatggaataaggagtaagattgatatcaggaatcaggttcttgttcggcaacataggcaatatgataccactgatagcaaggaatttcgccagcgtaatcatttcatcattcttcatacgctgagcaaattcggtaaacgtatgtttcagttcggtcaaaagaagcaccgtcacaatcaccatgacgtaaaaccaggaaggttgagtggctacgataggagccatgcaataggtaatcaacgcaataataatggtagtaacaccaaaaacatgaaactgagactgcttgacgtaatagttcagccccaacaacaatcccaacactgcaccgcctcccataaacagacgcatatcggtagggtcgagtatatagagcagataccccaagattccgataaaagtaaatgtacggtcggtcccgaaaagggtagtttcaccctcacgcttcaaactgattcggcgctgcgaaagcccgattagtaaagaaaacaaggtcaccagaacgaaagtgaccaattcccgcggcagatagttgtacaactgttccatatccatacattgctcttttagaataggaacaaatatacggtttatttgttaacgttcaccacgttttatacggttttttcattagttgggagttgtagtaacgcacatctccggtcacttccttaccgatgaagtccggtttcacaaaagattcctcttccgattccagttcgacttccgccacgacaagtccttcattctcaccataaaactcgtcaacttcgaatacatgcttaccgcttcgtaccaagtaacgggtcttatcaatgataccgggttcacaaagtttcatcagttcttccgcttccgccaaaggaagctccttctcccattcataacggctggttccggaagcattggaagctcctttaatggtaagataccccttatcgtcacggatacggacccgtacagtcctcccacgagcactgctgatatacccttgtacaatccggctatgcgaggttgccagagatttaaactcaccggagactaaaaactttcgttctatttcttgtgccatggcacaaaagtaatgaaattccttaaaatctcgtcataaactcaatgacgattttatcccgttccgactctttagggatacccgatttcttgtagaagtacttctcgaagttcagacggagatcggcaataaaagccttggagagactaagcgtaatcccgcctgtcacacggtgacgggcatagtcatttataatcaacgtttttgttgtctcgtcaatcgtaccattgctatggtccgtcatcatatcataacgggccaggaaagatattttattaaaaaccttcttcagcggcaagtcataattgacaaagctgttaactgcatgaacatctttaaacgcattatgcccatacattttatacaggtattccgcctcaatatggaaacgattgttctgataatagataccggcatcatacatattgattcgtacatcttccggttttatcatttgagtgctaagtgtcacattccagttcttgccgggcagtaactgcgcctttatagaataattcagtgttttgtgccattctttctggtttgtcaaaccggaaccgttgaacagtccaccttccagaataaacgggaaatctcctttatgcgtataggcagaagtaagtccgacatcacgcacattacccacctgcttggcaataaatgaacggttagcgaaatactgttggtgcggtgaacggtgtgcatctatcgtgaaaggaacacgcatctgcccaattgtaaaattcaggtctttcaccggaaagacacgtgcgtacgcatcaagcattttgatagagccttcatcggaaaggtcgatttctgccttataagcaaccagcggatgtacatttcccgaaacactgaaacgggcattgcgtacctcaaaacggctttctcctgtttctgtctgatattcatatttgccccggatcgttccgtggatttccggcagataatcctttatctccattgtctgcttatccagtttcttgccatctccggcatcatccttggcctgtccaaaggctgctgtcgttagcaaaagtgtaacgacggttgttgtaattctactcatttcagttgtttgctactatattcgcggcaaaagtacaactgtgaagatacaccggaatgacaaaccggctacggaagaattacagaaaagttacattgatattacaggggttacaaaagcgttacaaaacaagaattcaccacagatcacatgattttcaccgtccgggcagaccttcttttcgtgccccttgtgcaatctatgtaatctgtagtgaatcaatcaaccgaaaaaggagaatgcaaccaacattaccaatgccaaaataattaatgagacgaacactattttgactaccttttgggcttgttgttcttccttcttactaatcgctgtttttttcttagccttacccataatagttagttttaaagttcaacactaacaaagtaagaacaaatcttttaactttccaaaaataatacttgctaattttgttttttatgattcctgcgaagaaaactccatcaggtaagccttgataaagccatcgatcttaccgtccattactccgttcacatccgaagtctgatagttggtacgatgatcctttacacggcggtcatcaaatacatagcttcggatttgcgacccccattcaatcttcatcttaccggcttccacctttgcctgttccgccatacgatgctgcaattccttatcatacaagatagagcgtaactgacgcattgcattttcacggttcttcggctggtcgcgggtttcggtattctcaatcaggatttcctcttcttcgcccgtataagggtctttatactgataacgcaaacggacaccggattctaccttgttcacattctgaccaccggcaccaccgcttcggaatgtatcccaggaaatacgtgctgtttctatattcacctcgatactgtcgtctaccagcggagtcacaaatacggaagcaaaagaagtcatacgcttaccttgtgcattgtacggagagacacgaaccaaccgatgcacgccgttctcacctttcagataaccgtaagcaaaatctccttcgatattgatcgtacaagttttgattcccgcctcatcaccttcctgaaggttggcaatcgtagccttataaccatttgtctcggcatagcgcagatacatacgcatcaacatggatgcccagtcctgactttccgtaccaccggcaccggaattgattttcaacacacaatccatctggtcggcttcgtcacgaagcatattcttgagttcaagtgcttccaccgcctcactggctttcgcataagcggcatctacatcttcctctgtcaccagttcttctttatagaaatcaaatgccagttccagctcgtctgccagtgtcttcacctcattataaccgctaatccacttctgcagatcctttaccaacttcatttgagcttccgcccgtttctggtcgtcccagaatcccggagcttgtgtccttaattgttcttcttcgacttgaattttcttcccgtcgatgtcaaagatacctcctcagcgcatctgtgcgctctttcacgtctttaagttgttcaatagtaatcatctgatttacaattttattagttatattttttcaaatccggcgacaaagatacgaaaaagcctgcttactcctcatacatcttttcaatcaactcgctataattctgcgctacaaccgcccgtttcaatttcagcgtgttggtcagttcgccacgttccatgctgaatggttcgggaagcagagtgaagcgcttgatttgctcgtaatgagcaaactgctgttgcaacgtttctatccgggcacggaaaagaccgacaatcttcggatgttgcagcagttcggccatatctttatactcaatgcctttctccttagcatattccttcacgtatccatacacaggaacaataagggcagaaacaaacttacgctgatcggcaataatagcaatctgatcgatataacggtcaatcaccagttttgtttccaacgcttgcggagcgatatatttgccgttcgatgttttgaacaggtctttgatacgttccgtcaggaaaagctgtccattcttaaagtaacctgcatcccccgtgtggaaccatccgtcggggtcaatagcggcagcagtggcttccgctttcttataatatcctttcgtgatcgtcttgccacgaagcagtatttcattgtcttcgcctatcttcacttcaactcccggcagtacgacacccaccgaaccgatgtcatagcccaccggcaacgtacaggatacagtagccgtagattccgtcaagccgtatccaaccaccatattgatgcctaccgaatgaacaaattcattgatctcatcgggaacggcagcaccggcagtcgggaaaaagtttccattctcaatgccgatcgtcttcttcagtaaagaatagatcgttttttcgtagaacttatatttcagctgattcatcaccggaggtgttttccctcggcgcagataatccagattatggattctacccactttgatagcatccagcatcaacgccttctttaaaccggttgtctcattgatcttctcctgtacgcctgcatataccttttcccagaaacggggaacactgcacatcaacgtcggccggatctccttgatagtcgtctgaatatctgccggacgaagattgatacaaatctgcacgcctttatgaatacaaaggtaacaccacgctttctcgaatacgtgcgtcagtgggaggaagttcatggatacatccttatccgacattgtcgtcaggcggtcgtcatgtgtatggaactgttccagatagcaggaatgatgcagcatgactcctttcggttcgcccgttgttccggacgtataaaggatattcgccaaatcatcgtaagaagcgcgttccgtacgtgcttccaccgtatcattatgcgggagtccctcccccattgccataaattcatcaaagtagatagaagatacatcacgagggtctttcaccaccgaacggtcaaagataatcagttgttgcagggaagaacagaaaccgaaaatgctgaaagcagcatcatattgaaactgttcccccacaaaaaggtaacgaatctgcgcatcattgatgatgtattgcgcttgcgcaggcgaactggtcgcataaaacggaatggtaacagcgcgattggcaaatgcaccaaagtcaacatagaaccattcgggcttattctgtgaaaatataccgatattctcttgttcttccactcccaacgccacgaaagcattagctgcttgtcgtacagttcccgagaactgattccacgaaataggaatccattgagctgtctcatagtcgcggtattttaaggctaccttgtcgccatatttttcggcctgacgatggaccaggacagataaatgatgataagtcatactctttgtattagtaaatatggtacaaaggtattagttttatttgaaactattgctcaaaacgactatctttgtgcaaagattaagatatagataaaagatttgcactatgaaatatgatattccgtatatgtcgacagaggctgtaagcctacttaaatcgctgattagtatcccttcaatcagccgggaagaaacccaggctgcggatttcctgcaaaattatattgaaatggcaggtatgcagaccggacgtaaaggaaataatgtgtggtgctttagcc

SEQ ID NO: 3122 - DNA, 171 bp, Unknown
  gut microbiota DNA sequence
taggtcttgatttaatgcatatttgtaatgttacaatatagggttatctaatcttttctgtgattataagtgtttgaaaattaatggtatagtattgaaagggatgtaacaattacttgtataagatttattttcagtttatctttgggaaaactttgatacacctctgaa

SEQ ID NO: 3123 - DNA, 11198 bp, Unknown
  gut microbiota DNA sequence
gtagagggaatttactatgttttagtaaaagtattatttaaatattgtgagttatcagaaatggtagttggcttggatattttcgggtattctaaaaataattcggcatgaggacaaaattttgtttcccgaaatgatttttcggggaaattcgtatctttgtgctgttctagcaaggcttttaagtacaaaaatgaagaaccattcctgtaaatgcttagtaatcagatatggtaataaaagccccatttttttttgctcttattttctttcctgccggcttatttgtatctttgaaccctatataaaaagagtatttcaaatcgtaaaatcgtaaaatcgtaaattatgttttccggaattgtagaagaatatgctaccttggtagcactggtgaaagaccaggagaatatacactttacatttaagtgttcgtttgtgaatgagttgaaaatcgaccagagtatttctcacaacggtgtctgcctgacagtagtaagtctgacggatgacacgtatacggtgactgccatgaaagaaacattggaacgttccaatctcggtctgttgaaggtaggagataaggtgaatgtagagcgtagcatgatgatgaacggccgtttggatgggcatattgttcagggacatgtagaccagactgcaacctgcattgatatcaaggatgcagaaggaagctggtactttacatttcggtatgcgtttgataaagaaatggcaaagcgcggatatattactgttgataagggttcggtgaccgtgaacggtgttagtctgacggtatgtaatccgacagatgatacttttcaggtggctatcattccttatacttatgaatataccaatttccatacgtttacaatcggcagtgtggtgaatatcgagtttgatataatcggcaagtatatcagccggatgattcaatacaaataatatggaatatacagactttctgcaattggtactttcccggcagagtgaccgggcgtatgataaagaacgtccggtagaagcggagaagttggagaggattttagaggcgggtcgtttggctccttctgcctgtaatgcacagccttggaagttcgtggtgataactgaccgtgaattggctttaaaagtgggtaaggctgctgcaggacttgggatgaataaatttgctaaggatgctccagtacatatcctgattgtagaagagtccgccaatatcacttctctacttggaggaaaagtgaaggataagcatttcccgctgattgatattggaattgctgctgctcatatcacattggctgctgaaagtgaaggactgggatcgtgtattttgggctggtttgatgaaaaggagataaagcgcttgaccggcatccctgcttccaaacgtctgttactggatgttgcgatcggatatccggtaaaggagaagcggaagaagatgagaaagccgcaggaaaaagtggtttcttataatcgttactgattctaaaagaataaatatttccaacttgtagaatagctatataacagaaggcgtcgttggttttaaaggaacgacttctttctttaaaaccaaaaatgaatgtattaggtcgctgatagatagtttaatataaaagccccatatttggggcttttatattaatatacttatttcttttttgacaactctttcagtagatgatctactgctgctttcagttgagcatcttctcctttcaggctggctcccggttcgttgtagaccagaatgtctggttgtaaagtttgattttcgagatattttccttgcatatccatacatcctacctgtgggataccgaatacgatagatgggtcaatctgtcgttcccaccatacagcagtcatggttcctgcaacgggagtaccaatcaatttgccgatgcctaatgtcttatatacgtatggagtaccgtgagcattactgtaattgtcttcacaagctaacatacatgaaggcttcagccatttgttgaatgggtcgcttccgatatattgtccacgtggaacgaaacgctggtattcttttccgctcagaagggtaacgacgtcatcgtgcagccaaccgccgccattatgacgggtatctactatgacagcttctttgttgcggtaacgtcccagtaactcggagtacattttacggaagctcggactatccattccttttatatgtacgtaggcaatacgaccgccagataactcctctactttctgtgcgcaacgtttcacccaacgtttgtagagcaattcactttgtgccccatagctgatagctttcacagtttcttcaaaacgctttttggtggccgggtcatatacggtaagtattactttgcgtcctaccttgccttcaaacaatgggaagtaatcagcattggcttcaatcgtttttccgtctactttttcgatgatacatcctgctttcacatcagttttcttttgagtgaaaggactctgatccagaatttctttgattttcagtcctgtaccactatatgattcatcatagaagacgcccaatgtagcggtagataatgcactgcctccacctgcataacgggctcccgtatgtgaggcattcagttctccgagcagttcgctcagcatttcagcaaagtcataattattattgatatgtggcaggaagcgttggtaagcttctttatatcctttccagtcggttccttgaaggtctgcgacatagaatttatcatttacctgttggtagacatggtcgaagatatatgcgcgttcgccataaggacgataatcgaagaaggcttcaaattcaatcggagtgactttgctgccggcgatttcgattttctttagttggcttcttgtgcacataaagatgttcttaccttctttatcggggatcaatgcacctccaccgactcctttgagcaatattttggtggtattttcttttaatttatgttcccacaaatcatagtcaccttcgaaagctgccagataatagagtacatcgcctttcggagttagtactgcgtcactaagacgggaagaattgactgtcaggcggacaatgcgatcgaaacgattttcgaggtcgaaggtcagcggcttgacttcttcttttttcttgtcttcttctttcttggtatcttttgttttagcgtctttcttatctttcttcttttcagctttctctttctccttcttggccttttcttctttctctgttttttcagcctcttcaagtagggcgaggtcctctttgctcatggtgaaacggttgtatgcatctacatcgaagaacatgatataggtatcgctttcgcttccccagctaccgtgactacggtatccggaacggtcactgttccatatcatggcttttccacccaatacccatttggcattggtgtcgctgtatccgctttcggtaaggttcaccatttctccttttccgtcagctttcaacagtaccacatctttattattccagccgcctataccaataaaatcagagagaatccatttactgtcgggactccattggaaccattggtcaccgtctgcataagaatactggtatttggcatccataacagtacgtacagctttgcttttcagattgataacacgaatagccgtacggttttcaaggaaagcaatctcctttccgtcagggctatactgtggttggaaagaagcgatgttagatttagtcaagcgttcttctttcaattcggtggcataagtgaactgcttttcttctttacgtacgatcgttgatgtgtaaagttgccaaagtccgttacgttccgatgagtaaactaaagtacgtccgtcgggggcaaaactgatgtcacgttcctggtcgggagtattcgtaatttgcttcgttgttttgtagtcgatagaagtgacgtatacatcaccgcgcatgataaatgccacttccttacccttaggagaaacggcaatgtcagttgcgccgtacgatctgatctggcggatgatgtctttgtctatcttatccgacaggatagtgatatttactttttgtggctgtccgcccggaacaagcgtgtaaatctcgccattatagccgtagcataatttaccttcgcttgccatactcagaaagcgtaccggatgtttggtgtggaaagtgatttgcttggaagtatttgttccaggggtacgttggaagatgttgaacgaacctttttcttcactcaaataatagaatgacttaccgtcgggagcccataccggttcacggtcttcacctccgaaagtggtttgcttctggtatacgggcgtctttccgggagtatagctccagatgtcacgggcgataggggatacctgatgtttacgccagtagtcttcatatccttttttatcctgataaagcataactccttccttattaatagagatgcactccataggcatggatgaaaacatggtgggacgtcctcctgtaacggccacttcgtatatctgctggaattgtcccgagggaaatccggcatcctcggcagaaggggcgatattagctgtgaacaggatatgcttgtcgtctttataagcgacaggcttttcgctgccggaatgagtggtcaatcgttgggggactcctccctctttggcgacaacgaaaacatcaagactccccatgcggtcggatgcaaaagctatctgctttccgtcgggactccataccggagtggtgtcaaaagccggattcgtggtgatttgggtggcacgtccgccggttgacggtactgtgtaaatgtctcccttgtaggtgaatgcaatggttgttccgtccggagaaagagcgcaatagcgcatccatagtggagcttcttgtgccgcaattgttcctgcaaagcagagagcaaatgcacttagtagtagtttcttcatttttctttattataattgtgttaattcatttctaaaggtctaagggggcgctatttataaatctttgagtagtactttacttgcctttttatagtattcttctctcgattctgtcagcaccttccattcatcgctaaattcttcgtctttatcaatcttgaaattctcggaaccgtatgtgtccaaacgatcaagcaaaattgctacatttaattggttgatatccatagaaggctgataaccgatatcttcacttttttggtcggttactacctcatgtatcaggtctatttcctgtaattgataaagtacttggttcgtcagccggatgggtatctgatgttcttccgatatttctgccgccgtataaggaggatcgttcttttcgaaccgtttggcgatgagtgacataatcaggatagagataaaatcccggtaacgcctgctgatattacgtgtgtcctggtcgaagctaaaactgcggatgttctgtcccgcgtatgccagttcagcaccgaacaggcagatagtccaggaaatctgtaaccagagcaggaatagaggaagtgcggcaaagctaccgtagatagcattgtattttgatacccacaactggctgttgatatataggaactggaaagcctgataagcggagccggccagaataccggcaataagagcgtgtttgaattttactttcgtgttcggcatgaaaatatacagcccggtgaacatcatccatgtgagaacgaaggggataagccgtatcatgaacttcatgacaggagcaagcaggacgaaatcatccatttgtttgagtatggtactcataaacagggaaagtcctccggaaacaactatcagaatcggcatcaacaggaacatggagaaataatccgtaatcttgcgatacatggaacgtgctttctttacttcccagatacggttgaatgtgatttcaatattgctgaccagattgatgaccgtccataacaacatcactaaacctactccgatgaaaacacctcctttggtttgtgagagataggaattgacaaaagagagaatggcttctgtcgtttctatatttcctccgaagccgttgcggaactggtgttccattaggttgtcgaacccgaagccacgggctacggcaaataaaatggcaagtatcggcacaatggcgagcagcgtgctgtatgtcagcgcagaggccttgttagccattcggtctttggtgaaccggttgatacaaagatagatcgtttttataatattgtagagcgagaacttagttctggtcacttcgtcttccgtgatgcgccaaatgtcatacgtaagaaacttccatatatcagtgattttcttcttcatggctcagggttttaaaaagaaaaagcagtcagcctataagccgagttctgtaccttatataaataaggtgtctgtcatttatctgagtgacgtgtcaccacggcactttagcggtctaccctccgacatggagcgagcaactctcataacgccggtttacatgaccttacaactcctaagacgtacagcccgacatgtcaccatgcggctggtgggctcttactccaccttctcacccttacctctccccgaaaggaatggcggttattttcttctacgttactctaccctcacggacagctttctgttaggaagtaggatgctctgtgttgcccggactttcctcctgcacgaaaacgtgcacgcgacagaccggccaactgctttaggctgcaaaaatacgtcatttattttgttttagccaaagaatgtgtcacaaatagaaataatttctacctttgctatcattaaatcatggttcgatgaagaaaattatcctttttttctgctgctttctggcagttgcgtcagttaccctgaatgctcaggagatacgtcctatgcctgctgattccgcttatggagtagtgcatatttctgtctgtaatttacgtgacgaggggaagtttacctccggtatgagtacacaagcattgttaggaatgccggttaaagttctgcaatatacgggttggtacgagattcaaacaccggatgattataccggttgggtacatcgaatggttattacccccatgtcgaaggaaagatataatgaatggaaccgtgccgaaaagattgtggttactgcccattatggattcacttatgagaagccggatgagaaatcgcaaaccgtatctgacgtagtggcaggaaaccgcttgaagtgggaaggaagcaaagggcatttttataaagtctcttatccggacggtcggcaagcatatatttccaaatcgatctcacagccggagacaaaatggagagcttctctgaaacaggatgtggagagtattatcgaaactgcatatactatgataggcattccctatctgtgggccggtacttcttccaaaggagtagattgcagcggtctggttcgtacggtgctgttcatgcatgatattattattcccagggatgcatcgcaacaggcttatataggagaacgcatcgagattacttccgattttgctaatgtgcaacggggagatttggtgtttttcggtcggaaagcgttttccggacggaaagaaggtatctctcatgtcggtatctatttaggaaataaacagtttatccatgctcttggcgatgtgcatatcagtagctttgaaccggcagataagaactatgatgaatttaatacggggcgtttgctttttgcagtccgctttctgccatatataaataaggagaaagggatgaatactacggaacataatcctcactaccttccacaataacccctttattttattgtcttatcacacttataactttgaaaacatgcaaaacagaagagatttcttgaaaacggcggcttttgcagctttaggttccgggctagtggttcgccaggcattggccggggaattatcaccttctaccttatatataaataaactcggcttgggcgggaagatgaaaatgaagtttttcccttatgagttgaaattaagacatgtatttactgtggccacctattcgcgtactacaactcccgacgtacaggtggaaatagaatatgaagggatcaccggatacggggaggcttctatgcccccttatttaggtgaaacagtggagtctgtcatgaatttcctcaggaaggtgaacttggagcagttttctgatccttttcagttagaagacattttgtcatacgttgacagtctctcgccgaaagatactgcagctaaagcagcagtggatattgctcttcacgatttagtgggaaaattgctgggcgctccgtggtatcagatatggggattgaataaggaaaagacgccttctaccacttttactattggcattgatactccggatgtggtgcgtgcgaaaacaaaagaatgtgccgggcggtttaatatattaaaggtgaaactgggacgggacaatgataaagagatgattgagaccattcgctcggtgacagaccttccgatagcgatagacgctaatcaaggttggaaagaccgtcagtacgcgctcgatatgattcattggctgaaagaaaaagggattgtgatgatagagcagcctatgccgaaagagcagttggatgacattgcgtggataacccagcagagtccgttgccgatatttgccgatgagtctttgcagcgtttgggagatgtggcagcattgaaaggtgcttttacgggaattaatatcaagttgatgaaatgtaccggtatgcgtgaggcatggaaaatggtgacattggcgcacgcgctcggtatgcgtgtaatggtagggtgtatgacagagacttcctgtgctatatctgccgcttcgcaattctcgccactcgttgattttgccgacctggatggcaacctgcttatctccaacgaccgctttaaaggagtggaagtagtgcgaggaaaaatcaccctgaatgatttgcccgggataggtgtcatgaaaatctagtcttactgaatgaatgtcagagtgttaacgccacctgacatacaacgaatgtaaatttgtcaggtgttgtcgttaaccgttgttaagccctaaatattctctgttaaaagaggacaaaaaagtgtgacaagtagaataagtgaacgatatttgttattattttaacgtcgtaaaagttaaaacaatgtcgaatattaacattttaaagaattataaatcatgaaacagacaacaaagaacattctgggagtaggagctatcgttcttcttagctcaggagttgcaggattgacaacttacaaattgttgcaatctaacgaggctgctacagagacatcttttaatgagatgttcaagcagaatcccaatgtcaaattggctgcttttgacgcggtaaacgctcaacctgtcgatttgactcaagctgcggaaaattcgcttcatgctgtcgtacatataaggtctactcaggaagctaaaacaagaacggttcagcaagcgccggatatttttgatttcttctttggagacggacgcgggcagcaacgtcaggtgcaaactcagccccgtgtaggattcggttcgggggtgattatttctaaagacggatatatcgtaacgaacaatcacgtgattgatggtgcggatgaaatcagtgtgaaactgaatgataaccgtgagttcaaaggacgtgtgattgggaccgatcccagcactgaccttgcactggtgaaaatcgaaggcgatgattttccgactattccggtaggagattctgaagctttgaaagtaggagagtgggtattggcggtaggtaacccgttcaatctgaattctactgtaactgccggtatcgtaagtgcaaaagcccgttcgttgggagtatataataatggtatagaatcattcatccagacggatgctgcgatcaaccaaggtaatagtggtggcgcactggtgaatgcgaaaggcgaattggtaggtatcaactccgtactttcttctcccacaggtgcatacgcaggatatggttttgccattccgaccagtattatgacaaaggtcatcgccgacttgaaacaatatggaacagtacaacgtgcattgctcggtatccgtggtggttctattggtagtagtctaatggacgaccgtcagccgattgacaactccggtaagacattggcagataaagcgaaggaactgggtgtagtagaaggtgtatgggtttccgaaatcgtagaaaacggttctgcgtcaggagctgacatcaaggtagacgacgtaatcatcggtttggataataagaaggtgtccaacatggctgacttgcaggaagctatcgctaaacatcgtccgggtgacaaagtgaaagtgaaactgatccgtgacaagaaagaaaagaccgttgaagtaacgttgaagaacgaacagggtactaccaagattgtgaaggatgcaggtatggaaatcctgggagctgctttcaaagaattgccggatgatttgaaaaaacaattgaatctgggctatgggttgcaagtaacgggagtttcctccggtaagatgtcggatgcaggagttcgcaaaggatttatcattctgaaagctaacgaccagccgatgcgtaaagtcagcgatctggaagaagtaatgaaggctgcagttaagtctccgaaccaggtattgttcttgaccggtgtcttcccgtcaggcaaacgtggatacttcgccgtcgatttgactcaggaataaggtgtaaaataaggtaataagattacaggataagctaatgaaatagaaaaaggatgccgtcaatcaacttgccggcatctctttttgttttattagtagaaaaatatagtgtaaaagttacttaattttgtatgttaacaaattatttgtcgtaactttgcactccaaatctgtttttaaagaatgagacaactaaagattaccaaaagtatcactaacagagagagcgcttctcttgataagtatttgcaggaaatcggccgtgaagacctgattactgttgaggaagaagtggaactcgctcaacgcattcgtaagggtgaccgtgtagcattggaaaaattgacacgtgccaatcttcgtttcgtcgtatctgtggccaaacagtaccagaaccagggtttgagtttgcctgacttgattaatgaaggcaatttaggactgattaaggctgccga

SEQ ID NO: 3124 - DNA, 3403 bp, Unknown
  gut microbiota DNA sequence
ccgttgaaccaggtcggttcgctgaataaaatcagtaaagccttctccaagttcgaacaggaaaacgagcggcgtccgtctcctgaggagttggcagatgaactggaaattccggttgataaaatctctgatacgctgaaggtgtccggccgtcatatttcggtggatgcgccttttgtggaaggagaggataacagcctgttggatgtgttggtgaacgatgattcgccaatggcggaccgctctctggttaatgagtctcttgcgagggaaattgatagagctctttctacgttaaccgatagagaaaaagaaatcattcagatgttttttggtatcggacaacaggaaatgacattagaagaaatcggcgataagtttggcctcacacgtgagcgcgttcgtcagattaaagaaaaagcaattagaagacttagacaaagtaatcgtagtaaattgctcaaatcttacttgggataagtaaggaatatcagtttctgaaagaaaaaagaatttgagtcgcataagtcgcacttttcatatagaagaatgtacttatgcgactttttatttagtttcccgtccgttatttctatgactaagaaatactatttatttgagataaatggaggtaatctcctcttttttcttacctttgccacaataaaatttatatgatatgaaatacgtaaaaatactatttgcaattgcacttgtgtttaccatgtgctcggctttttctttgaaaaaagatcactctaaacctgtttatgcttttgggatttctgcttcgtttacagatactgttgtatatttcacagaaattcagatcttggatagtgtgagtctcagtaaggaaggttttctggctcatcgtgaattgtatagctatcagttgaaaaattatctggaggacaatctgttacagcaaaatagtacatgtatgatttacttctcggagaacaaaagtaaattagagaaggaagcaacgaaaatcctcaataaatataaaaagagtaggaatatgacagtaacgcggattgaagctgataagttccgttttacgaaaccggaagaataataattgaattgttaatatggataagagatgtggtttgcatctcttatttttttatatttgtcctttgtaataaacttaaaactaatgaaaaagattaaaatactttccctttttgtatgcttgatagcattattggcagcctgtgaagatgaagatataacaccctcttatggtgcacgtacagtattggtttatattgcaggtaataatagcctcggtcagtctgactttgattcaaaggatgtgtcggaaatgatagaaggaatgaaaggcacggaggggacaacaaacaacctgttggtttattttgctggttataagaagactgccaagctgattcgtctgataaaaaatggaaaaggcgaggtgaaacaggaaactgtaatgagttatgataaacacaattcggttagtcttgacgtgatgaaggatgtttttagaacggcattctctaattatccggctaagagttatggaattgttttttggtctcatggcgatgggtggctgcattatcagaacccctcaactcgttggtggggacaggatacaagcgatggagattatcgaatgaatatttcggatttgcacgaggcattgtctgttgctcctcattttgattttatgctgtttgatgcttgttatatgcagtctgttgaagtgatttatcaattacgtgaccgtactgattattttataggttctcctacggaaataccgggaccgggtgctccgtatgaagcagtggttcccgcattattctcacaagataaaccggaaattaatattgcagagagctattatacagtttatgctgaaaaatataataatggcatagggatttctaacgagaactggacgggtggagtctctgtttcggttgttaagagtagtgagcttccggcattggctactgccactaaaggggttttgcagacagctgcttcaatgcagcaaagagctaatatagatattacggggattttgtgctatgatcctttgcgcagtaagaactatcatgattttatgggattgatgaaaaaaatccaagaaaaccaacaagcatttgataactatgcccatgcataccaaaacgctgttgtttggaagaatactacggataataattattgtacctatccttcggggtatggggaaatggtttcaatgaacggttttgaaggactttctacttatatattacgggggaatgatgtaaagcaagatgcatattatcgtcagtcggtagaatggtattccgctgccggttgggctgatgtatattggtaattaaattggcagcgtattttactatggatacacaaaatattactcctttaacaccacaaaaagacagacaggttagtggctggctctcattttttctttttgttgtaggtcttggtgcggcaataacagttgttacttcaattgcagatttttctttagatgcttatgacataggagagggagacttttttatctatcttgtggcattaattgatattgtttatgttttggggattggaggattggctctttatacgatattggcttttttgaataagcggtcgaatgcggtctttttgggtaaaagttatctcattattatttttctctctaatctattactattattaggtggagattacggtgattatggttggggcagtctgtcgcaaattctaaaggctttgatttttgggattgtttggtttgtttatctttgcttgtctgagcaagtttccgatttatttccgaaggaagaacggaaaattttgagtagagataaatatatagttggttctttgatatttactccggtacttttgttaggcatttcaatgttggtttattggggaagtgttccaactcctatgaatattactttaggacatggtgattacagtgatggtattattgcttttcatgcacctgaaggtgctatttgcgagaaggatacagttgataatgtatgtcatacttttgctattggtgacagtatttggggtgttgtcattggattttatgataccaacgctagtgaagaatatttcaaggaatgtattgattcatggcgtaatacagaactggatggatatgatttttctatcctcaatactcatcaggaagtgattaatcagagtaatataatgcgtatgcaatctgtaaagtatgaaactcgtccagtattgatttggcagttctctatgttgctcagcccggaaacaggtaaggcatgtattgtttccttgtattctacaactgagaaaattgaaaatttggtaaatgatcttatggcttctgtgcgttttaagtaaa

SEQ ID NO: 3125 - DNA, 647 bp, Unknown
  gut microbiota DNA sequence
ctatggacagggaaagtgtttctacgtttagaaactccagttccgaggctggaaattctagtttctccgtatggaaattagagtttctaagcgtggaaacggaagtttataactgtggaaatgccaaggaactcatagcttttatcagactgttattcgtgttttgttgcaggtggcagatacattcttgtttttcaattctattgtaggtatcttgtttatggctgtgtttcgcgggaaaaggatttctaccaaaggagatctgaacaataaaacagcttttgtataggttgtattatataataatgtgtagtcattctacataggttctccctgcagtaaaatttatgttctacaacatccttgtcaatcagcgtgttacaaaaaagtttcaaaaaagattagaaaaatagtcatatatatttggatgttatggataagttgtctactttttcacccgctttgctagagagacagagcctaatgattgacattttgctaatgataaagggttcggaaaataaaaacaaaaaaacttcgaaaaaagtttggatgttatctgataaagtccttatctttgcacccgcttttgaaacggaagcgacaagttctttgaaatattgataaacaatacaagtagtacaaga

SEQ ID NO: 3126 - DNA, 250 bp, Unknown
  gut microbiota DNA sequence
tagtacgcaagtagaactgaggacggtatttgttgtggaacggagtgtgacgaccaccttcttctttcttcaagatataaacctcagctttgaatttagagtgcggtttaatctgacctggtttacaaagaaccataccacgtttgatttcgttcttgtcaataccacgaagcaaaagacctacgttgtcaccagcttcaccttgatccaacagtttacggaacatttcaacaccagttacaactgattt

SEQ ID NO: 3127 - DNA, 259 bp, Unknown
  gut microbiota DNA sequence
cccgtatacaccgaacggaacagatgcggaacgtatggtgcccgacgaagatcgacggcacgattgtaaacggcacgaaaggtacgaagataggtagaaaccgtattccagctacacccacgactacgaagataaacttcgaacccttttaaccactctgaagttacctcattgaaggcaaaatcatctttcccacgataagcaataatggcattgagactgctgcgatagacatgagcagttccaaagtttccctcca

SEQ ID NO: 3128 - DNA, 459 bp, Unknown
  gut microbiota DNA sequence
cccttcttttgtgaattctggacggtatttcatccgctttagtggataacgaaccataaaatcctgaaatgctgtagataatcttcctctttcttcaaccattggatgtgcatatggaattccataattctccagatagaataaatgaataaatattgccagaaatcctaaaaagaatccatacaatccccaaaaggcacacagaatgatcagaaaaaacttcatcagacgaaacgcactggtgaataactcattcggaatcgaaaatgtagcaatcgcagtcaatgccaccacgatcactacgatcgtactaacaagatgtgcatcaactgctgcctgtccaacgatcagaccgccaacaacacccatcgttcctccgagctgtcccggaagtctgattcctgcttctcttaataactcaaacgataattccatcagcagtacctccacgatcaccgg

SEQ ID NO: 3129 - DNA, 158 bp, Unknown
  gut microbiota DNA sequence
acaaatatatatcactcttttttctgattatttttttataatctgactaacttgctgattgataggctggttcaagaaaaccgccgtttctatacaagaagctacgaagggaagaatacaaaactatacacattattatatttaaacgagggaggaaa

SEQ ID NO: 3130 - DNA, 2772 bp, Unknown
  gut microbiota DNA sequence
gggatgatggctggagaggaggatgtgcggctattaatgcacgtgttggcatatacgaggggcttggcggtggtggacggatgtctgacattctattcgagaatatacagattgagaacttgtatggcggacgaccaattgctgtggagatagtaagtgacggtacagatacaggaagtttgtccggagttgtctttcggaatataactttcacaggcgacaaatacctgcctgcccaggtacggggagtaagtcgtgagtttcctttacagaatgtgacatttgataatgttgtgtttaacggaagacagataaagaaggctgattgtagaaaatatctgtttgtcaatccatatatagagaatttacaatttaaataaatacgaattaccatgaaaaaactattaacaactttattgtttggaagcattttttcggcttgtgccgaaagacaaccggttcctgccattccgtcagatccggaaatagaaggaaaaatagagaaactgctgaaaggcatgactcttgaagagaagattggccagatgtgcgaactgaccattggggtagtgacggataaaaacaataataaattgagcgaggcgttactggatacggtgattggcaaatataaggtaggttcgttactgaatattcctttcggagtcagccagaaaaaggaagtgtttgcagaagtgatcacacagattcaaaagaaatctttggaagaaatcgggattccatgcatttatggtttggatcaaattcacggggcttcatatacgcaagacgctacttattttcctcaaggtatcaatatggcggctactttcaacagggaactggccaggcgttgtgcggagattacggcttacgagactcgcgcttgttgtgtaccgtggacatttgctcctgtaatggatctcgggcgcgatcctcgttggccgcgtatgtgggaaagtttcggggaagatacctatgtgaatgcacaaatggctgtacaggctgtacgtggtttgcagggggataatccgaataaggtggatgaatatcatatttcatcctgtatcaagcattttatgggatatggggttccagtctccggtaaagaccgtaccccttcttctattaccgatattgacatgcgtgagaaatactttgctcctttcaaggcggcgattcgtgcgggtgccttgtcgctgatggtcaattccgccaataatagcggggtggcgtttcatgccaataaagagttattgaccggatggttgaaggaggacttgaactgggatggaatgattgtgaccgattggaatgatattaataatctgtattttcgcgaccatattgcaagcagcaagaaagatgccgtcaggctagctgtcaatgcgggtattgatatggcaatgattccttcggagggacagttttgtatcgacttgaaagaactggttgaggaaggggctgtttcaatggaacgtattgacgatgccgtacgacgtgtattacgtttgaaattccgcttgggattgtttgagaatccatactgggatattcggaaatatgacaagtttggaagtcgggagtttgcagaagtggcattgcaagctgctagggaatcggaggtcttgttgaaaaatgaaggagaacttttgcctttacgtaagggaacgaagatattgttggcaggtccgaacgccaatgctatgcgttgtctcaacggaggatggtcttacagttggcagggagagttggcggatgaatttgcgcaggcttataatactatctatgaagcattatgcaacaagtttggtacggaaaatattatctatgaaccgggagtgacgtatgttgctgatcctaatgataactggtggaaagaaaatcgtccggaaataggaaaggcagttactgctgccggtagggcggatgtgataatagcttgtataggagagaatacgtattgtgagactccgggaaatctgaatgacttgaatctttcttccaatcagaaagagttggtgagagcacttgcggcaacaggaaagccggtaatattggttctgaacgaaggacggccgcgtataatccatgagatagaacctttggcaaaagcggtggttcatattatgttgccgggaaattacggtggagatgcgttggctgacttgattgccggagatgcgaactttagcgctaaattgccttttacctatccgaaattcatcaattcgcttgctacgtatgattataagccgtgtgaacagatgggaactatggaaggggagtataattatgatgcggttatggatattcaatggccctttggacatggattaagttatacgtcctatgagtatagtaattttaaagtgaatcgtacgactttcaatgcggatgatgaactgatatttgaagtggatgtaaagaacgtgggagaaagggcaggtaaggaaacggtcctgttgtattccagtgatttggcagctagtgtttcgccggatgtgatccgtcttcgttattttgagaaagttgaattacaaccgggtgaaacaaagaaagttgttatgaagttgaaaggaagcgatctggcttttgtcggtcaggataggaaatggcggttggagcaaggacgtttccgcatgaagtgtggcagtgaaatactgtatatagactgcgagaaagacaaaatctgggatactcccaatatcgactaagcagaaatgatatgaagaaactgattacaataagcgtgatattcgttgttatagc

SEQ ID NO: 3131 - DNA, 42884 bp, Unknown
  gut microbiota DNA sequence
aatttaatatttcatatgaaaattcgataccatctgatgtgggagcaagtataatcggatctgtcttccaactgctgtcttcccaggatttataggtagaacctgcagccgccgacataacagagaaagcacctacaggagagaagctgtccgtctccatctctaccattccctgagacgcatctacaaccgcgtcttttatctctatctcatattcctgcgcaccctctgtaaattcttttacatggaacgcgccgacctcactctcatttccaactatctccggaacctgtatggatacgttcacctcatcattgggctgtgtttcatttccagtgccatctattacagttacatcataaacagcaatccagtcaaccttttcacctgaagcagctagttcagagtttaacctttctacaaagccatcagtatcgctcataacttcggccttgacatccgcaatattttccatggctttttccgaaccagatactgctatcacagctccatcgtccgctacagtggagacaatgaccctctcagccatgatattcagcttactgagcgttgttctatatgcttttgctgtggcacagttaccaagaccaaccaaaccacttatgcctgtttttacagtgtcattttgtgtctctttttcagttccgttagatggtgttgctaccggctgtttttccggcacatctgtttcgactatagtttctggtacagtttcactgctttctggtatagtttcactgctttcactattcccgggtgcagccgctgtttcctctgcggtatcatccgctgctgatgtaattacttcctgcgctgcttttgttgtgtcatccgatttctcttctgatgtacgttctgtctcttcctggttgcccgtctccgttgctttttctgtacttttctctgttttatcaacaacttctgattctgtatctgtttcagactcctttaccatctctgccttcggcagttccgaaacatctccggtttcactgtcaccaactacaggagcgtaacggcggataatagatgccactggctcaccatctgctgcttccggttcaactgctgcctccgtctccggagcttctgtttctcttgtctctgcttctgttgcttcctgaattgcttcctgagttttttcctcagtagtttccaaatctgtggttgcttcaccggtaggagctgcttcagctgcttctgtagaagtctcagtctcaccctctgtcgaagccgtgcctgcctcttcagaagcagtcgtatgttcctctgccggtgcgcttgtctcactctcatccggaacaactgtggtagtgccatctgcggtttcttctttagatggtacggtggaatcaggagctgtcgtctcctctacaggcttagaaatgtaattaacttcctcatccccatatgccgcatcaaaattctttacagtaatccgtttggtctttttgaccttttcttctccattatcaaaccttatgatattggtggtgcaactaatggtatcttccccgttgttcacatataaaaaaataatctcttcagcacctgttaccatatacatatcatcggcatcttccggcactcgtatgaacactcttaactccacatccacacttccgccttccggttccgggaatacttccattaattttccctctccgaaaaacatgctttcgaattctgcaacctttccattggtaaaatcaaggtcactgacagacacctgattatcactgacaatagactcccggactgcattcagcaacttggtaccatccatcgtaaatgcaacagtttctgccgagtctgccgcataaacagtatttattccggtacccgcatttgttagtaccatagctgccgcaagcaggaacgctaaccaccgtttctgtaaatcatataatgtcctcattcttcccccaccccttttttgactgttcaccctgtcactcctctcattatctttatcacctgtatcatctgggataaatccgtaatcagctaaatttagtctaccaaatttgggttacaaccaggtaacaaaatgagatttaatgaaaatttgataatagcatcaatccacatacataaaaagggtctaaccagagcagttacttccataatcataaaaaaagtgtaagaggtaaagcacgaatggtgcgttttatctcttacacttatatcccttttttacggaaggaaatccctgattttcttgcttttagaaggattacgaagctttctgagagccgctgtctcaatttgccgaatgcgctccctggtcacgttgaaccgtttccccacttcctccagggtcaggggatgcccggtctccaggccgaaacgcagaatgatgacctcacgctcccgtggattcagcccctgaagcatgctgtcaatctcctcccgcaaaagaaaactctctgccttatcctctgtggaggcattggcgtcatctgccacaaaatcccccagattggagccttcctcgtcacctaccggggtctccagggatacggtatctcccgatgcctgaatcagctccgccactcttttcccggacatgtttacttcctcagccacttcctccatagacggttcacgtcccagcttcacagacaggctgcgctgggcacggcggattttatttaccgcctccaccatgtggaccggaagccggatggtcctggactggtccgccagggacctggtaatggactgcttcacccaccatgtggcataggtgctgagcctgtaacctttggcatagtcaaacttttccactgctttcataagccccagattcccctcctgaaccaggtccagaaaactcatacccctgccggtatagcgtttggcaatgctgaccaccaggcgcaggttagcctccaccagcttgcggcccgcttccacatcaccttctgacttgcgtcttgcaaggtctgattcctcctccggtgtaagcagtgcaatggaaccaatctcttttaagtattcacggattgggtctgctgtggacacgccttccagaagccgctcctggccatatccgtcgtattcctcctcttcctcatccccgccggaaaccatactgccgccatccagcatctcatccggatccaggcggtctcttccccatctgaattcctccttcgccagagacggctggtccagctcggcatcatcgtctaaaagaaagtccccctccggcaattcctcttccggttcctcgggagcctgtatgtggacacccttgcgctccagcttcagatagacatcctccatctcttccggcgtcatctgaacatcccggaaatggtccagcacctgggtcatctccagacgaccttcctgggcggccgcttcaccgaccagctgttccagtctcttagacaattccattttatccatatgttatcctcccccttctcctgggacatactaaatataggtactgtattgcgtaaatccctctttaaacagcggggcttacgcagcacagtaccgttactgggtctgcgggtacgttaggtacatactatctcatgggaacgcataaactttgctactgccttatcccactcattttccagggtcttgtccatggtaaaaaggtgcagcgaagttcccgtcacacaatataatgctccgtcttcgtaacggatattcagataaagtccctgtatctgctcactgcttatcccgcttccggaagtggaagcgaatttttccgtgtccgaaggaggaagcagcaggacgatatggaaactccccggcagcttttttccttttattagtgaaaaacatacggggcgaagcactttccaggaggaaaagaattcaatctggttctcctccagctcttcatctgtataatatccctgtctgatgtgtccgtcgatggaaaaattgttgtaggtgacaatgttcacttccttaaccaggaagctgtcaaaatcttccttcaggaacagtttggatgtaaatgtctttacatcctctactttcaatgcaatcataaccttctcctgccctgggttacaccacaggtttccaaattcttactcaattatacagtttttgactattgacgtcaaatagaaactgtggggatttttttactgagttctttatgggggtgcgggggtatgttctgatatgttctgatatactctgatattctctgatataatttgatatgatctgattgatttactttaacatatgtctgtttattttcatagtgtcataatatcgactatatgttatttgttacagcacctccacaacctcaaagcgttcaaacgtaataagtgtctgatcggtaaaagtataaccgcgcttggcagcgtcccgtgtccaatagcgtatattgcccgatttccattgttcaaagttttcgtcctcaccctcaagttttaccatatcccaagtcaggccgcaaaacctgacggtttcaacatgcaccgtcttaatcacacaagccggagtgctccgaccgtcaagtaccagtgatagatcaccaacgcttggcgccttctcatcctccaatataaccgaaactgttgccgttttctttccggcaagtaccagggctaaaagttcgtctgccatttcggggctatcgccaaaggaaaagcgttcaaaataacctttatctgtgtttttcattcctattctcctcttctgtaaatgtattttttcgttcgccttttcgttccccttttccgccaaaggcactgtttaccaataaaatgcgcttaaatagttgggtagtctggagattaatgattccctgttattgtctgataaaatgctgagtctgtcttgtaaatgccctgatagggctgttcaatgtaataatcatttttttctaaatagacaaacagtgtgctttttgcatcttctgtgtttatatcaatttttatatactcatcagcttgtggtatatcctgtacggattctttcgctgttgcttgtgcattgttcatagacgatatacattggcttatccactcactgtcagaatatttttccgtttcttctccaaccgttacatcaattgactgtatggtgctttcctctggtaagctaatcggatttgcatttttttgtgaacaaccggctgaagaacaggccataataccagcaataagaaaacttaatatctttttcataaaaattcctccataaattctgtttgtcgagtgcactttatcagcctactatgaatattcttgttccttccactctaatttttaatgttgaatctgtcaagtggattcatctgctcttgttatgactattgtgtccatgtgttgtctttatgattgtgtgtttgctttatgattttatgctttatgattctattttttatgatatcactctgtccgtcagctttggcggctcttggcggttccgtgagttcgcagtgctgccatcttgaatccgctgcgctccttcaagatggacggctggcgccgtatgcatagagacacggaaggccgggagggtaagcgagcttgccctcccggccttccgtgtctctatgcgcactgcttgtagctaggccaggtttgtataccccatcatatcacggtctacggctttggcggcttcacggccttcttgtatggcccataccaccagggactggcctctgtgcatgtcgccggctgtgaatatctggtctgcgctggtgcggtaggtgccgggttctgtggctgcatttgtcctggcgtccaggtctatgccgaaggcgtctgccacgtaggcctgggctcctgtgaagccggaggctatgagcaccagatcggcaggaatttcacgctcgctgccttccacagctgccatgatggtgcggcctgtttcctcgtcttttttgggaaccaggtttgtgattatggctttgcacaccttgccttccccgtcttttatgaattcctttacagtggtctggtactgccttgggtctgaaccgaatatgcttatggcttcctcctggccgtaatctgttttgaggattctgggccattccggccaggtgttgttctccgcccgctctgcgggaggcttgggcatcatctccagttgggtgactgagacgcagccgtgccggatggatgtgcctgcacagtcatttccagtgtctccgcctccgattaccagcacatgcttatcctttgccgatataaaacttccgtcctccagtccggaatccagcaggctctttgtggtggctttcagaaaatccaccgcaaagtatatgcctgcactgtccctgcccggcacgtcgatatcccttgggttggaggccccgcaggccaggatgatgcggtcaaattccttcctgattttgccggcccggtaattcctgcccacatccgctcccgtcacaaaggtgattccctccttcttcatcacatctaccttgcgctcaatcacccatttttccagcttcatattgggtatgccgtacatcagcaggccgcccacacggtcgttccgctcaaatactgtgacgctgtgcccccgtttgttcagctggtccgcagctgccagccccgcgggaccggatccgataaccgccaccttttttccggtgcggatggagggcggattagggagggcatatccgctgctgtatgctttttcaatgatagctctctcattttcttttatggtcactgcatctccgtacagactgcaggtgcaggccgcttcgcagggtgccggacataccctggaggtgaactccgggaagctgttagttttttttagccggttgtatgcctgtttccagttgccggtatacaccagatcattccattcaggcaccagattgtgcagggggcatccgctgaccatccctccaatcattatgcctgactggcagaagggcacaccgcagtccatacacctggccccctggcgtctctgttcctcctcgcttaaggaagcgtgaaactcattccagtttttaatccgatcctcaggagttttcccccttcccacttctctctcatattccaagaatcctgttgatttacccatgtttgttctgcctccttaccctcttaaattggcgtaaaatgcctcaatctgcgcctgttcactgttcagtcccttttcctccatctgcacaatggcattcatcatgcgccggtaatcatggggaacaaccttcttgaacataggcaggtattcactgaaatgctccaggatccgcctgcctttcagagagttggtacaggccacatgttcttcaatcaggcctttcagttccagtacatcatatttgccggtcacttcctcgaaggataccagctccttattgaggcgcttgtaaaagctgcggtcctcgtccagcacataggcgatgccgccgctcatgccggccccgaagttcttgcccgtggctcccagcaccaccacgcagccgcctgtcatatattcacagccatggtctcccatgccctccaccacagcggtggcacctgaattccggacgcagaagcgctcccctgcgattccgtttatgaaagcctttccgctggtggctccatatagggccacattgccgattatgatattctcctcagcctgaaagagcacgcctttcggaggaaataccaccagcttgcctccggaaagtcccttgccgaaatagtcattggaatcccctgccagctccagggtcagtccccttgggataaatgcgccaaagctctgtcccccgcttccgctgcagctgacggtaaatgtatcgtcagaaagcccttccgggtatttcctggttatctcggagccgaatatggtccccagggcacggttcacattggtcacctccacctgaatgcgctttttctggccgtttccaagagcgctcttaaattttctcaaaaacacctgctcatccatggtatcctccagacggaaatcaaagacctgtttcccgctgtatccggccaccttctgaccttcataagggttatccagtatccttcttaaatccacctgattggcccggccaaggggaaggttctcacgcctctttagaaggtctgtacgccccaccagatcatccacagtgcgcacacccagccttgccatgtactcgcgcagctcctgcgctatgaacagcatgaagttcaccacatactccggtttgcccctgaaacgctttctcagctccgggttctgggtggcaatgcccataggacatgtatccaggttgcagacacgcatcatcacgcatcccagggtcactaacggcgccgtggcaaagccgaattcctccgcccccagcatacaggccattgccacatcccttccggtcataagctttccgtccgtctccagaatcaccttgtcgcgaagtccgttcataatcagggtctgatgggcctctgccacacccagctcccacggaagtcctgcgttgtaaatggaattcctgggggcggctcctgtccctccgtcataggctgagatcaggattacctgggccccggccttggccacgccggcggccacggttcccactccagcctcagataccagcttgacggatatcctggccctggtattggaattctttaaatcatatatgagctgggccagatcctcgatggaatagatgtcatgatggggcggaggcgatataaggcttactcccgtggtagagtgtctggtttttgccacccacggatagaccttgcctccgggcagctggccgccctcgcccggctttgctccctgggccatctttatctgaatctcctgggcgcttaccaggtatcggctggtaaccccaaaacgcccggaagccacctgtttgatggcggaacagcggttgttccctgccggcccgggaatcaggcggtccaggctctccccgccctctcctgtgttggatttgccgtgaatacggttcatcgctatggccaggcattcatgggcttcccgggagatggacccataggacatggcccctgtcttaaaacgcctgacaatggattccacagactccacctgttccagcgggatgcctccgtcctcaggaaacttaaaatccatcagggagcgcagatggtacatcttatcttctctgtccacctgggccgtatattgtttaaagatatcataattacccgacctggctgcatcctgaaggagatggatggtcagcggattataaaggtgatcctcctcaccggagcgggacttgtgactgcccgcgctttccagggtcaaatccacatccagccccagagggtcaaaggcagcggagtgaaggacgtccacatcccccgcaatgtcctttaatgtaataccccccacacggctcacagtgtccgtaaaatatttatccaccacatcctctgagatgccgatggcctcaaaaatctgggcgccctgataggactggatggtggaaatgcccatcttggaggcaatcttcacaatgccgtggagcacagccagatcatagtcgcagacagccgcgtaatagtccttgtccagcatgccggaatcaatcagggaacgaatggactcatgggccagataggggttgacggcacaggccccgtaccccagcagggcggcaaaatgatggacctcccttggctcgccgctttccagtatcagagccacgctggtgcgtttcttggtccttaccagatactgctgcagggctgatacagccagcagggaggggatgggtacgtggttctcatcaatatcccggtctgagagtatgatgatattggcaccgtccttgtgagccctgtccgcctccaggaacaggcggtcaatggccttttccagggaggtattcttatagtaggtaatgggaattacctccactttgaacccaggcttcttcatgttcttaattttaagtaaatccaactctgtcaggatgggattctccacttttaggattttgcagttttttgcggcctcctccagaatattgccctcctcgcctacgtagacggttgtggatgtcacgatttcctcacgtatggcgtcaatgggcggattggtcacctgggcaaaaagctgcttaaaatagttgaataagggctggtgcttcttggaaagcacggccagggggctgtccacacccatggcggacactgcctctgccccgttaagagccatggggagaatcatggtcttatactgctcatatgtgtaaccgtatgttttctgaagcctcagacgttcttcatccttcatggcgggtatgcatttgtttggcaccggcaggtcctttatgctccacaggttggaatccagccactccccgtatgggttgcgggacgcatagtagtgcttaagctcatcgtcatcaataagccttccctgctttgtatccaccagcagcatttttccggggcgcaggcggtcctttttcaccaccttagtctggtcaatgtctatggctcccacctcagaggccagtatcatatagccgtcctctgttatgtaataccgggagggacgaagcccgttccggtccagcacagcccccaccacgtcgccgtccgtaaacaggatggaagcaggtccgtcccatggctccatcatggtggcataataccggtagaaatccttgatttcgctgtccatgtacttgtcgttttcccagggcgcggggatggtgaccatgacggccaggggcaggtccatgccgctcataaccataaattccagggcattgtccagcatggcggaatcagagccttcctggtttataatgggcagcaccttgtgcatgtcgtatctgaaatactcggattccatgttctcctccctggccaccattttatccacattgccgcggatggtattgatttcaccgttgtggacaataaagcggtagggatgggcccgcatccagctgggattggtgttggtgctgaatctggaatgtacaatggcaatggctgacttataatcttcatcctggagatccgaaaaaaacagcctcagctcactcaccagaaacatacctttatacacaatggtcctgctgcttaaggataccacataggtgtcttcattgctctgctcaaaaacacggcgggcaatgtaaagctttctgtcaaaatccagtcctgccttcattccggcgggcttgcccacaaagccctgggcaatatagggcatcacgtccacggccttcctgccgagaatttcaggcgcagtgggtacctctctccatcccaggaaggtcataccctctttgcgcacaataatctcaaacatcttcatggcctggctgcggatcagttcatcctgggggaagaaaaacatacccacgccatacgctctctcgtctcctatctgaaagcccaggtgttcagtcaccttcttaaaaaatccgtgggaaatctggagcatgatacccacgccgtctcctgtcttgccctcagcgtcctttcctgccctgtgttccagattttcaacaatatgaagggcctggtccactgtgcggtggctccttatcccctttatattggccactgcgccgatgccgcagttatcatgctcaaaacgtggttcatacagtcctggctgtttctgtttggattccataggtctttcttcctttctttgtaaaaataggggggatttaataaactaatttcaaaacaaaaaaggcggcacctgtctctaggtaccgcctgcggtcattcttgtgaatttcatttaattatgttactgcaaaaggcagattacatctcgcctaatccgctctcaatggcctcggtcagggtcttcatagcctcttcctcgtcctcgccgtcacaaatcaggttaatctcagtgccgcacttaattccggctgccataacgttcagaacgctcttagcaacaatcttcttctccccacattcaattgtgatgtcgctcttgaacttcatagctgtctgtgaaagaactcctgctggtcttaagtgtaatccggatggatttacaaccgttaatgttttgctgatcataatacactctccttattcactattttgtactctggacactgccactgcccatgtcccttatgaaagattctattacatctgacttcctatgtcaagttaatcggaaaaatcctaagcaactttttcacaatcttgatgtcggaaaaaagctccggcatcattcctgaccacgcgtgttcattcgtacgaaggaactttgcagacgctgcacggcaggcgctttttgtctttcaattgcttctgcccgggaataaacacagccgcagtaatcctgacggtaaagtccgtacaacgcggataattccacggaacgcttatagccgtttttcttcttgaaatccgaaaccagataaggaattccatactgcccggccagtctgcatccgatatcattgagccactgggcattctttaaagggctgatggacagggtggttgtgaaataatcaaagtctcctgaaaccgctgccctggcggcgcggtcaagccgcagttcatagcagcggaagcaccgctccccaccctccggatccttctcatggcccctggcaactgaaaagaattcctccggttcatagctgcctgccaggaacctgaccggcctttccgtctccatttcccgtatcagccgttcctgctccttcaccctggcctcatactctgtctcaggaaaaatattgggattataataatacacggtcacatcaaaatattggctcagatattccagcacatagctgctgcagggagcacagcagctgtgcagcagcagcttagggacccgtccctcttcccgcagtccctctataagccggtccaattccttttggtagttgcgcttctgtcctggctgtgtcattccttttttgtcctttcctgaaccctctgttatttttacctgccaaaaagagaggccgcccgtttacggcccctctttttaaaatactcccgaattttcttatcataacagcaggcccaaacccctctgggcctatgcacggtaagtcttacaggaaatccctgattcgtttgcttctcaccggattgcgcagctttctcagagccttggcctcaatctgacggatgcgttccctggttacattgaattccttgcccacttcctccaatgtacggggatgaccgtcttccaggccgaaccgcagtacaatgacctggcgctccctctccttaaggtctcccaaaagagcgtcaatgtgttcccgcagcatcacggattccacattgccctccggagtcaccacattgttgtccgccacaaaatcacccagattggagtcgtcctcctcaccaatgggtgtttcaagggaagccggctccctggcaatctgcatgatttccatgaccttatcttccgtcatatcaagagcctctgccagctctgtcacagaaggctcatagcccagctccagcgtcagctttctctgcatcttggacatcttgttgatggtctctaccatatgcaccggtactcggattgtcctcgcctgatctgccaaagcccttgtaacggactggcggatccaccatgtagcatatgtacttagtttgtaaccctttgtatagtcaaacttttccacgcccttgatcagtcctaaattgccctcctgtaccaggtccaggaagctcatgcccctgcctgtatagcgctttgcaatgctgaccacaagacgcaggttggcctcgattaacctctcctttgcaaactcatcgccgtcagccttgcgctgggccaaatcaagctcttcgtctgccgtaagaaggggcacggtgccaatttctttgagatacatgcggaccgggtcctctgttccgattccctctaacagatccactgcatccaggtcgatttcttcctcttctgcatctttaatgaagctgtcgtcgtctaaatccaggtccaaatcaatgtcatcaagcagaacagtgtcctcggtaagcatcgcttcgtccagtacgggaaccacgtcaatgttgcggccctccaggtaactgtaaatttggtccatctgttccggtgacagattatccccggtaaaaaaatcattaatctcccctgcatccaatgtgttgtgtttggtttttgcatgttcgaccagcttttccagcttctttaaaaaatcgtccttttccactgataaacgtcctttcgcttaaaggtaaatgtggaaactcccacaacttatcattatataccatcgaaaaccttatttcaacaattttcgacatttatttttattctatctgtttccgccctgatccctcttccggatgatttctcaacagaatctgcacgttctccctgatatttccaatggtgacctcggtcctggatccgccatactcgccgtccagcacccagtccacctcctgttccgaagtaaggcgtatggaggatgtcttgaacttatacacatactcgttgggttcttccctgagaaacatgtaggatatgatattgctcaaatccaccggtgtcctgggcatccgtatgagcagcacctcaaagagaccgtcattgagggccacagactggttcaccagccccttaaacccgcctacactgatggtattggtcaccatgccaaaggcaaaatcctcctccagcacctgtccgtcccactccaccttcatatgatagggcttcagtcctgccaggctctttacgccttccagcatgtaggcctggtgtcccagaagattcttcctgtcctgggatgtcagataggacacctctgtaaaagccccaaaggctgctatatacataaaattcatgtcctcgcaaaaggttccggtgtcaatggcaaagggggttccctccacaatatcccaggcagccaggggcatgcgctttggtattcccaggctggtggcaaagtcattggtggatccggcaggaatatagcccagaagcggcattttcttaagcttcatcattccggatatggtttcattgagtgtgccgtctccgccactgcacaccaccacatccacctttttacccagcctggccaccacttccatggcatccttctgcttttgggtaacgtggacacgaagctcatatccggccttggtgaaaatatccagtatttccatcagctgtcccttgatctgttccttaccggaacggggattgaatacaaacaacatttttttcatcctgcattcctccctttcagtgtaaccatttttgtcaatcttatccaatgagctttgtatatgcgttaaatgcattgggcaaagcgtatgtgtgctccagttcctccctggataccatgaaacaggataagggctcctcctcctgtgagagaaccaccctgtacccggtcatatgccactccacatgtgaaaacacatgctttgcctccggcagcagctccaccgacgccacctgctccctgtcaagtcccagcacctgcggcaccgtctccccggaagtctttccctcaatgttgggaagctcgtaaagggaggccagcagtcccttgggagggcgcttgcgtatggccaccttatcctgatattctatgataaaaacggtccgctcctcgatcttcctcgccttggccggagatttgtacggaatctccttccaccagccgttctttcttgtaaggcagatggaggccagaggacactggctgcatctgggttcgccgccgggtatgcacaccagggccccgatttctatgagaccctggttgtaatggctggcctcatcctgcggcatcacggctttaagctctgcctcgatgccagccttcaccgaggctttctttatatcctcccggtcccccaggagcctggaaatgacgcggagcacattgccgtccacggccggcagcggaatgccgtaggcaatggatgcaatggcccccgctgtatagcttccgattcccggcagccgtatcagttcatcaaaggatgcaggaaggcagccgccgtattctgacataatcatctgggccgctgcctttaaatttctggcccggttataatatcccaggccttcccacatcttcatgagatgatcgtcttctgcctgtgccagatgggacacagtgggaaacgcttccatgaagcgctcaaaatagggcttgaccgcctctaccctggtctgctggagcatgatttccgatatccatacccggtatggcttcggatcatccctccatggaagggagcgggccctggatgaataccaggccagcagggggcgttccacagcactgagacgttccctgcgtccaagaggcatctcctccctctccagtacctggaggcggtcatacaaatgtcctgtatcatacatatccatatatacctcttaccgatacctcccctgaaatgacggctgatatgtttccgtcctcccgtctgaccagaaggctgccttcattgtcaatgcccagggcctttcctttgtactgacctctggggtccagcaccaggacctctctgttcaagttgacaagggccttattgtagtcatccctgagacccgacatatcacatgtcttcatgaagatatcataataatattcaaaactgtccgccactgcggcaatgactaagctgcgcttaatgctcctgcctgcctccagcttaagggaggtggctgttgccctgatttcctccggaaagtcatctatatttacattgattccaataccgggtatcacatagcggatgcattccacttccgtactcatctccgtgaggattccgcatatctttttgccattaagaaccgcatcgttgggccatttaatcatggcctcaagtcccgtgctctccttcacgcccctgaccactgacagccccgcgataagggtcagcatggatgcgctcatgggagacatgaccggcctgagcaccatgctcatccagatgcctgtaccggccggggagacccagcttttccccctccgcccttttccggctgtctggcggtctgcaaccaccagtgttccgtggggcgctccctcttctgccagtttcctggctcttatattggtggaatccgtctcatcaaaatattccagcctggtcccaatccactgcgtatgcagcatggatgcaagctcagcctgggttatgacgtcagcaccttccacaagccggtatcccctgttccggaccgcctctattacatatccttcttccctcagttcacctacagccttccagacagcagtgcgggaaactcccagcatcccgcacagctgctgtccggacaggtaatcttcggtgcttttgagcatccgcaaaatctctgtcttcatatgccgctcctctatgcccagatactgatggcgcttacgatgccaaggaccataagacctgccgccaaagccagctgcaggatgctggcaccgaactttttcttatcccttcccctggtcttaagctcaaatattccgtttaccgcatttaacaatgctgccagcaaaaacaccagagggaaaagcatatgatttccctccgggttaatgaatgacagcacagccaggattacaatggcaatcccaagtatcaggtgcaccatgtccaggaataccccggaatggcgttcactccgtcctctctgtccctgcatatattatgattctcctaacgttgcaagcataactgctttgatggtatgcatccggttctcagcctcgtcaaacacaaccgactggcctgactcgaatacttcgtctgttacctccagctcggacacattaaaacgttctcccatctccttgccaatcttggtcttaaggtcatggaaagagggcaggcagtgcaggaaaatggcattaggtccggccaggtccatgacagcctttgtcaccttatatggagtcagctcctcaatcctctcctcccatacctcgtcaggctcacccatggatacccacacatccgtatcaatgatatccgctcccttaaccgcttccgccacatgctctgtgagagtaacggaaccgccactggccgccgcataggcctcgcattccttgaccagagatggatccgggaaatacttagccggagcacaggccacgaaatgcatgcccatctttgtgcaggcaatcatcagggagttacccatattataacgcgcatctcccatatacacaagctttaagcctttcaaacatcccaaatgctcccgtatggtgagaagatccgccaacatctgggtggggtggtcctcattggtcaggccgttccagacaggcacaccggcgtactttgccagttcctccacgatttcctgtccgaaaccacggtattcgatgccctcatacattcttcccaaaactcttgctgtatccgcaatgctttccttctttccaatctgtgacccagacgggtccagataagtggtccccatacccaggtcatgggctgccacctcaaaggcgcaccgcgtcctggtactggttttctcaaagataagggccacattctttccgcgcagcgaatctaccagaaacccctgtttctttttatccttcaggtccgctgccaaatccagcagatatgtaatctcctccggtgtataatccttcagtgtcaaaaaatgtcttccttttaagtccatagcgtcctccctgttatgccgcccatgtcctgccatggccccggcttgattttctgcaataaataaccatgcatttctattcaaaaacgcatagttatttatatttatgcatctttatgcataatatactacacctgagtgctgctgtcaagtatgggaatcatggcttttaatgcagcggcaccagcttttttatgaatcaggcgcagcagttcctccactgtataaattttaaaacggcttatacggtattgttttgccaaatcctccagtatggacaggtacagctccttatagtcccatccctccttcagtttcagttcctttgccagccggggaaatacctgttctgtataaacacggtatcccggagagaggtccttctgttcctcccgcccgcgctttgcctctcctgcctcctgcagctccggttccatgtaagaaaggaggctctgtatctccgatatcattttatcaaaatagtaaggctcgccttccggcgcatcaatataataggcacgtcccgccaggccataaagcatacgttttccgtcgaaataccccagcagcatgtttcttctcgcccggcgtctgtcaaactccagaaggccgcccaaatccctcctcggcgccacatggtacagggttgctccttccggcacctccagcttcttttccgtgtctacaccgtaaccatatatccgcaggacaatcacgtccctgtaacctctgtccagaagcacatccaccggcacattattgattccgccgccgtccatataatacttgccgcccagccgctcctgacggaagcccagcagataggcgctggccataagcaggtccgctattcctccctcaggagcctccttcacatcggcaataaggggatgccggtcagaaatggagtaggttaccacatagagctccctgtcagaatttcgtatcttttcctcgtccaccacatcctcaatcaaagccctgaggggagcaatatcaaagccgccgtccctcagaacccgtatggccccggctatgagttcccccacattaaggggcgccagactggaaatattcttaaggctgaattttgtcagacgttccataagttcatcatccacatccatgaccctggagtaactgatattctcccagatgcgctctgccttttcaaaatcatccatgcaaataagggcaccgttcaaggcgcccaccgaagtacccgcggcgccctttatcctgatgcccgcttccctgagggcgcgccaggcgcctatctgataagcgccttttgcccctccgccctccaggacaattccatattccttactcaaatccagctgcagcttaatgatgtccacctgccctttcccgtctgcccagaataaatgccaaaggacgaataagaataagcgtgaggaatgatacggccacgaacactgccagctgcgcctccatgggcagccctgccagagctgccgcaaatccgcctatggcccctgcggcaaaccacagggaagtcaggcatccgaaagccagctccactcccagaaaaatcaaaaatgatacaagccatccaactgataacatatgcaccttctccttcctgcgggcagatatggccaaaagtcctttccttatgctgtctccgccgggacgctgcagcttcttctctgtctggctgtctcaaacataagaacggaagcagcaattgcagcgttcagggattccacctttccctccatgggaatcttcaccaggcagtctgccagcgaggtggtttcctccgtaagaccattggcctcatttccaattaaaaagcccacattgtcagtataatcttcctggtcataattattcatacctttcagatgggctgcaaaaagacgcactcccctgtttttcatgagcaggcaggcatcctgcaggtcatctgcatacacaaagggcatcctgaatatggatcccatcgtggatcgtatcacttttggattatatatatctgccgtatcatgattcataacaatgccggtgataccagcgccctctcctgccctgattatggtaccaaggtttccggggtcctgtatcgtctccagtaccatgatggccagagacctgccgtctggtgctggttttacaatgtcatccatggtatagcgcttctgcctcaccacggccagcactccctggggcgtctgcgtatctgccataacattcatgaccacatcgctgaccatctccggccggaaccgccccatccatttcctgttatccgcgtcccctgcaaagttctccgtaacatacagggcatccacatcctccgggttcagctccctgcacattctgaggccttccaccacatacatgccctcttcccgccgggcctttgctttgcttctcaggctcacaacacgctttacctgcttgtttgatgtactgttaatcatccgtattcattctcctgacactgcttatttgatgccttccagttcctccagccacaccctgcccgatgcatcgctgggcatcctcaaatcccctctgggggaaaccgccacagaacccaccttaggcccgtccggaaggcaggaacgcttaaactgctggctgaagaaacgtctgtagaacacattcagccatttaaggatcgtctccctgtcatactgagacttaaacgcctggattgccagacggtaaatcttggacggggcatatccgtatctgagtatatagtaaagataaaagtcatgaagctcataaggccccaccaaatcctctgttttctgtgaaatctggccgtcctccgggggcagaagttcagggctcacaggtgtatccagcacatcaaggagcacatccgccagctccttttcattgcatgtatccgcatagtagcggaccagatgacggaccagggtcttgggaaccgacccattgacaccatacatggacatgtggtcgccgttataggtagcccatcccagggcaagctccgacatgtctccggtcccgattaccaggcctcccacctcattggcgatatccatgagaacctgggttctttctctggcctggctgttctcataggtcacatcatgtttgtccatatcatggccgatatcttcaaaatggcgtgtcaccgcctccctgatattaatttcgcggagttttgcccccacctttccggccagggtgcaggcattattataagtcctgtctgtggtcccgaagcagggcatggttatgcaatgtatgccggacctggggatcctgaggctgtcaaaagccctcacagttaccagcagagccagcgtggagtcaagccctcccgacagtcctatcactgcttcatggcatcccgtgtgctccagacgcttcttaagacccatggcctgaatggatagtatctcctcacaccgcctgtttctctgtctctcatccctgggcacaaagggagccgggtccacgtaccggagcacatcaccgcccggctgcgtggaaccatgggtctgggtatcctgactccctgcgctgtcctccgaaaccgcatcaaagctgaactcaacggtcagatacccgccttcctccctggctgctgccgggtctgggaatgtgctcatgcgcctgcgctcactgtccaggcgttccaaatccatatcagcacatatgctctcgttgataaaccgtctggactccaccagacaggtcccgttttcagctataatattctggccgccaaacaccaaatcctgggtggattccccctcccccgcattggcatagacatacccgcacaccagcctggctgactggctgcatatcagatcatggcggtacatgtccttgcctgtggtctcatcgctggcagagcagtttaccaccaccgtggccccggccagggcatgtctgatgctgggcgggcatggcacccacacgtcctcgcatatttcagctgccaccgtaagttccggcatggtattgcacctgaataaaaggttggtgcccatggggactttctctccgttccagcaggtcatcaccggccgttcattgcccgggcaaaaattcctggcctcataaaactccgaataattgggcaggttccgcttgggcactacgcctataagcctgcccttttggatggctgccgctgcattgtagagcttcccgtcccgctcccagggaagccctaaaaacaccaggatgtcctttccatccgtaaaccggacaatacggcccagctcttccttcgcccttttcagcagggccttctgaccaaacaggtccgcacatgtatacgcggtaaggcaaagctccggaaacaccataagcttcactcccctgctgtatccctgaccaatcaagtccataatctgctgtgcgttatattgtgggtcagccaccctgacctttggcgtggcagctgctacccttaaaaatccatctttcatgtctggcctccattgaaaataattgttttgatttaatataccacagattaacagaaaaatatagggaggaattgggccggataggtacatgaaccggggaagggtttggggaaaactccccatttacatccccccaattctattatacaatcataaaaacaaataaaatacaggagttgtttctatgatgataaatgaattttccagaactgagatgctcataggcaccgaggggatgaataagcttaagaactccaccgtggctgtattcggagtcggaggggttgggtcccatgcagcggaggccctggccaggtgcggggtgggccgcctgattcttgtggacaatgatacggtttccctcaccaacattaaccggcagagtattgcgctccacagtaccatggggcagtttaagacccgggtcatgaaggacaaaattgctgacatctgtcccggcacacaggttattacctttgaggaatttgtgcttcccgataatatagaaagcctttttgaacgtatgaagcaccagatgggacagggcagctctgtggattatatcctggatgccatagataccgtgacagccaaacttgccctggcaggctttgccgcctcccacgctgtccctgtgatcgcttccatgggtaccggcaacaagcttcacccggaactctttcgtatatccgatatctcccagacctctgtatgccccctctgcaaggtaatgcgcagggaactaaaagccaggaacatcagggaactaaaggtctgctggtcgccggaacagcctcttacccccggacagacagcggaggataccgggtgccgccgcgccactcccggaagcatttcttttgtaccgcctgtggccggacttgttattgcaggagaaatcataagggatatctgcgggctggcttagccgcagatatccctcttcgttttataatgattcataccggccctattccaggggcgcccggtaaaacctgcctacaaactgctgtgtcctcagcacattgataatgatatgttcatctgcttcctgcatgatgtggatggcgttgtttacctcataggctgatatgactgtatttaaaaggtacattttctttttgctgtaccctcccatagcttccacacaggacattccatggcggaaatggctgatataggcgtccaccacctgctgccccttcatggtggttgcctgaagggtaaccagctcatagcggtggtggaaggcggaaatcatgcgtgtggagatgaactggaagataatagagtatcccgcgtgcttccagccgaaaatggcgccgtaaaagcagtacataacagcatttccaaaaaacacataggaccagatggagtgcccggtgcggttggatacaaacagggctataaagtccgtgcctccggtggacgcgtttcccctgagagcaatgacgattgcacttccaaagatgacgccgccaaaaataacattcagcacctcatctgtaaagatggggctgaagttgaatatctgcagaaaaatactgcttaagaatacctggaccagggaaaatatggtaaaacggaagctgattcccttgcagcacaggactgccaccggaatattcagcataatcatggtgacctgcatgggaatattaagcccgttcaattcccccagccgttccacaagcatggccatgcctgtaaatccaccggatatgataccagccggccgcacaaaaacctgcagtgcataggactggatgagggcggatacaaacaccgcagccactgtgataccggttcttacccgcctgtctttcttccattgattgataaaagctgagattctcagaatctgtcccataggaaaattcgctcctgtttcatttagttatcatatcacataattatccttcatgcttttttgccactgtaccaaatcctccagcgtatatttatccaccactccgctgatggcctcatccagctcgcgccacagacgcagggtcacacagtccatctgcctggtacaggggtttttatctccgcttaagcagtccaccggagccaggcttccttctgtgattctcaaaatagaacccactgtatagtccgatgacggtctggccaggtaatatcccccctgatttcccctgatgctgcgcacaaaaccggccctggataagatagagataatctgctccagatatttgccggatatcccctgccggttggctatgtcctttattttaacgggctcgccgtctccgtggatggctaaatccaccatagtgcggagagcataacggccttttgtcgatacaagcatgtatgttcacgtcctttgtcttaaattttatcctgccatgagtatatcatactattcctgtaggaaatatgtcaatagtaagttatcttccctgccaggtctgcctaaatgctttatgaatagagtgcactattttcgggaaaataatatggaaactgagaaaaattgcaggtccgattccataaggccggcctgctgacgattgagaacggaggatttttatgaagaatgaaccggtattcctgactgacaaaaaccacaatatcgtattggaggccctttcaccggctcccaatgcagctctccctgattcctgcaaaccctttgaaatcctggagcccgcagccactgagggcgcagcggaaaaacatcttccggtagtggaacaggacggactccatgtaacagtcaaggttggaaacattttccatcccatgggtcaggaacatagcatcggatgggtgtgccttgtgacaaaagccggctgtgtcatgcgtgttcccctgacccctgactgcgaaccagtggcatccttcaccctggaagaaggggacgctcctgctgctgcttacgcttactgtaatcttcacggactgtggaaaaaatcaatctgattccttccggcaaaacactcctcaaacagccccggatgacagtttttatacccgctgccattaccggggcagaatgccggaagcatccggacaaaaaaatgagagccgcccttcccccacagaaggcagctctcagtcacgatcaaaaaccgtcacactattagtttatctggcatccccataccaaacaaaaacccgtaaggcactcctttgtgcttcttacatggacactataccaccgctcccatgatttgtcaatcatttttgtgcatattagtgaattcctttcccctatatacaagtttttatataaatttctcccatccgtccgcagaccaaagacaaatgtcttctgtatatttatctttcatcggtacatactaacttaagccataatttttatctgaagtcacacagaaaggaagaaaccatggaattttcccaaaatttaaaagacaacattacttaccttcacaagaagctgaatgtagagacgaattttgacgtggtttaccgcgtagtccacatcggcggccgggaagcatgtctttatttcatagatggttttacaaaggatgaatccctgttgaaaattctgcaggtgttctccaccatcaagccggaggatatgccaaaggacgcccacggcttctccaaacagtatgttccatacggcgagatcggactgctttccaatgaccaggatatgaccgtccagctgctgtccggtgtatcctgcctctttattgacggttatgataaatgtattacgattgactgccgcacctatccttcccgcggtgtcagcgaaccggaaaaggataaagtcatgcggggctccagagatggctttgtggaaaccctgatttttaatacggccctgattcggcggagaatccgcgatcccaggcttaccgtggaaataacatctgccggagagagctcccacactgacattgccatctgttatatggaaaacagggttgataagcagctcctggataaaatcaagaaacggattcagaatctgaaggtagatgcgctgaccatgaatcaggaaagcctggcagagtgtctctttccctataaatggttcaatccattcccgaaatttaaattttcagaacggccggacacagctgccgcttcaattttggaaggaaatatcatcatcctggtagacaactctccttctgccatgatacttccctcctctgtctttgatatcattgaggaggcagatgattactactttcctcctattacaggcacttacctccgtctgtccaggatgaccatatccctgctgtccctgcttctaacccctacatggcttctgttcatgcagaatacggagctcataccggactggctggcatttatccggctttcggacccgcttaatgtgcctttaatctggcagcttctcatactggaatttgccattgacggcctgcggctggcggctgtcaatacccccaatatgctgaccacccccctcagtgtgattgccggtattgttctgggcgaatatgcagtaaaatcaggttggttcaacagtgagaccatgctctacatggcctttgttaccattgccaattattcccaggccagctttgaattaggatatgccatgaaattcatgcgtatcatcatattaatactgacatccatcctgaatatatggggatttgtcatcggaatcatcctgtccacctgtgccatcatattcaacagaaccattgccggaaagagctatatttatcctctgattccatttagcctctcagaattaaaaaagcgttttctcaggggacggctgcctcatacagagaaataattgacctatcccatggtaaagcagaatagagaaacagtgaaccggccttttggccggttctgtttcctaactcatattgttatacatatcaaaataggcctccgcctctttttctgtcaatgaaaaatgtttctccagcttggccagtatgacttttttgtctttcccctcttccaggttatcttttataagggctttaatgccctgtgacaagccctgctccaatccctgtgacaagccctgttccaagccctgcgacaagccctgttccaagccccgctccagcccattcttctgcgcatcttctgcaagccgcttataatagctttgcatggtagcttcgtcactggctgccttaaggcgctccaggtacagataacgcagttctttgtcggcattcaggcgttccagttcctccaccgcttccttcatataacggtttctctttgccatatctttaagcacctcccagtcacgggcggatataagctttgcccagtgatatatctctgtttgtttttcctcctcactgcaggaaaccagttgacttaagtatagcacacgcaggctgattttgccactatagacacacccggttttatcatccataagccgtatgaccgaataaaaatgctctgttcctttccgtggaaatcccaggatgctgatatgtatacactcctccaacgcatcataattctggcctttcaaaaagtcttctgtatacatacggctgatataaaagaggctccgttcttcccagaaaggatgtgacaaaagctgtatttctatattcactttcttacagtggttcaggcgcacctttacatccagtattccttcccggtcatcagcatattcctcgtggagaaatgtgtccgggaattccagactggtgatctcacctgccggaatgtccagcagactgcttaaaagccctgtcagcgcagtcttgttgcggaatgttttcttaaaggcgaagtcattggtcaggcttatatccaggggccttccgctgtctgccagctgttttagctgcaaatccacttttttctttccttccctaaaaaaacgtctgatacgccctttgtgccattttcccataggcattgtcctccatgaactatttgatttatgtgatatgagcggaaatcccggcagatacgccagtacccggcaaaaacattggattttatgccggaaaagatttttatatagattgttcagaaacaatctgattggtccagtataacatataaaggtactgctttcaatatctcccctgcttttaaacggagtaaatacgctttatatccatgcaaaaagcagcgccggatcccttacctttgccaaaggagagatatccggcgctgccaatcttctgttttaaatcatagccattacagcttatccgcatttctgaacagggtatggccgtttgcgttcttcaccagaccggtcacatcaggcttagccaggacgatggcattcagataatacagcggtataatgggcatctcatccatcaggatggcctccgcctccttgaatatctccatacgcttgctgttgtccgccaggttccggcattcttctatcatgctgtcatacttcatggcattgtccccgctccagcggttctggttataggcgcgggcctgggtaaagcagttcaggtttgtgtccggatccagatagtcaccggtccatccgtcaaagcaaacatcaaagtttccggccttctgctcatcccagtacaccttggactcaaaggtaacaatgtctgcctggactccaagattatccttccacatggactggattacctgggcaatgtccttattctcttttgtgttggtaacaataaaggtcagaacaggcagtccctctccattgggatatcccgcgtctgccaggagtttctttgcagcttccacatcctcttgaatcaaatcacctgatacggtgcggaaatcctcggaggagccttcatatggtatcccataaggcacgaatccgtaggccggctcaggctttgacggaacgatggactcgcagattgtcctgcggtcaatagccatggccagggcccttctcacatccggattggacagatactctttggaacagttgaaatcgtaatatctggttccaatcttgtcatatcctttcagttcttctgtattcccatactggtcaatggcctgggaagttaccaggttatcgcccatagcgtcaatctcacctgcattatatgcggacagggctgactccggagactggataatcacgatttccactccgtccagtttgacggaatcagcgtcatagtaattgggatttttcttcagcacatagctgctctggggatttatcttctccagggtaaatgcaccgttgcacacataggtatccgcggatttggtccagggatcctgtccctccaccacctcctgcttgacagggaaaaagttgctggacgctgtcagataaaggaaatatggcgtaggtgctttcagggttacctccagggttttgtcatccacagcctttacccccacatcctgggcagagccgccctgtgtgttgtattcttccccgcccttcagatagtgcagttcccaagcagccggggaagccgtatcaggattcaggacgcgcttccaggaatattcaaagtctcctgccgtcagatcacttccatcggaccatttaagtccgtccttcaatgtgaaggtgtaggtcagcccgtcttcgcttacctcatatgtgtcacacatggcattgctcaggcttccgtctgcctccagctggaacaggccgcagaacatattctgcaggaaggtggacgatgtgctgtagttattcagtgtagggtccagtgtttccggttcctccatcactgcataggtaaggatcttttctccctcttttgccccggcggtcccagctgccgaagcttctgtaccggcatctgtaccggcaggactgctttgtgcctggccgcagccggccagggtagtggctgtcagggctgcacacagcaataggcttaattttttcttcataacatttcctcctagtttttaacggattcccgtttggcagaatccaatacaggaaattatacctgcattctccgtggaaagtcaatacatggaaagcagtttggctgggccggccacgtcaccggccacctccctgtcacctccctgccacctccctgtcacaggcgcctctcctactccagctccagcccgcctgtatacagctggtaatacattcccctctcccttatcaggctctcgtggtctccccgctcagcaatacgtccatggtccagtaccatgatagcgtcggaattgcggatggtggaaagcctgtgggctatgacgaatacggtcctgcccttcatcagctcatccatgcctctctgcaccatagcctctgtcctggtatcaatgctggaagtggcttcatccagaatcaggaccggaggatctgcaatggctgcccgcgcaatggctaaaagctggcgctggccctgggacagctcctcgccgtctcctgtaagcatggtatcgtatccttccggcagcatctctataaactggtcggcattggccagcttcgccgcatcgcagatctccctgtccgtggcatccagctttccatatcgtatattctctctgattgtaccggtaaacaggtgggtatcctggagcacgatgccaagagagcggcgcaggtcgtctttctttatatggcggatatcaataccatcatatgtgatagagcccttctgtatgtcgtaaaaacggttaatcagattggttatggtggtctttcccgcccctgtggctcccacaaaagccagcttctgccccggcttcgcatacaggctgatgtcatggagcactgcatgccccggctcgtatccaaagtccatatcctgaaaccgcacatcaccggtaagtcttgtgtatgcggccgtgccgtcctcacagggacatttccaggcccacaggctggtccgttccggtacctctgtcatttttccgctttcatccatacggacattgacaagggtcacatctccccggtctgtctccggttcctcatccatcatattaaaaatacgttctgcccctgccagggccatgataatggaattggactgctgggatatctgggcaaagggctggttaaagctctttgtaaactggagataagaagcaatctggcccagggtcagccctgccaggccgcttagtgacagaattcctcctgcgatagctgtgagcacaaactgcaggttgcctatgttggtaatgaccggcataataacattggcgtacttgttggcgtggaatgcgctgtcatagagccggtcattcagcttgtcgaattcctccctggtctcttcctcatggttaaataccttgatgactttctgtccgcttaaacgctcctcaatgtatcccgtcacctttccgatagccagctgctgcgccacgaaataccgtccgcaccggcctgccagagtcctgctgacaaagagcatgagaactatcatggctgctgccaggacagagaggggaacgctgatacctatcatcaccgcggatatggctatgatggtgacaaaggaggacaataccatgggcagagcctggttaatcatctgtctcagggtgtcgatatcattggtataacggctcataagctctccatggggatgacggtcaaaataccgtacaggcagcgtctgcatatgctcaaacatctcatccctgatacgcttctggacgccctggccaatatttatcatcagacggttataagtgtaggtacaaataaccccaaccacataaaaggccgccagccctgccataacatggttcagaaccgtaaaatcaggatgctgctgccccaggagaggggtgataaaatcatctatgagcaccatcaaaaacagcggtcccgccacattggccagagcgcttatgacaatggtcaccagcacacagacaaactggagcctgtaagtgcctgccacataccccataaggcgttttgccgttttggcataatggtggttcacggctgcatttttcttatttcccatcatgatcctctccccctttcttctgggattcaaatacttccctgtaaatcttattcctggcaaacagctcctggggcgtaccaaagtcatccacagcgccgtggttcagcacgatcaccttatctgcatcctccacagaggatatcctctgtgctatgattattttggtggtgtcaggaatctcctcccggaacgctctgcgaatcatggcgtctgttttcgtatccactgcgctggtagaatcatccagaatcaatatcttaggcttcttgagcagggccctggcaatacagagcctctgcttctgtcccccggatacattggttcctccctggtcgatataggtttcatactggtcgggaaactgccggataaactcgtctgcctgggccagacagcaggcccgctcgatttccccgtccgtggcattttcattgccccaccgcaggttttcacggatggtgccgctgaacaggatatttttctgcagaaccactgccacctgatttctcagggacttaagcccatactccttcacatcccgtccgcccactttaagacagcccccggtcacatcgtacagccttggtatcagctgcacaagagtggttttggaacttcccgtccctcccagtatgcctatggtctctccggattttatgtggatatccacgtccttaagagccagcttctccttatctcctatgtagctgaaggacacatgctcaaagtcaatgctgccgtccgccacctcctgtaccgggtcatccgggtctgacaggctgctcttttcatccagcacctccacaatacgctctgccgaagaacgggccatgatgaccatcacaaacaccatggagagcatcatcaggctggacaatatctggaccgcatagataatcatgctggtgagctcacctgttgtcattctgcttcccacaatgagtctggctcccagccctgatatcagcaggatgcagttatacatgcagaactgcatcagcgggctgttccaggctacaatcttttccgcatacttaaactggtaaaagacctcctgggatatgtgccggaacttttcgatttcatacggctccctcacataggcttttaccacccggatggcgttcaggttttcctgaaccacgcggtttaacacgtcatagcgcttgaatacagcctcaaaatagggatgggcctttatcacaatgtaaaagagccccgctgccaggattggcagcacgataaaaaagatggtggaaagctccctgctgattcccatagccataatcagcgcaaaacagagcatgatggggcctctgatagcaatgcggattaccatttggtacgcattctgcacattggtgatgtccgtggtcagacgcgtcaccagactggaaggagaaaagcggtcaatattggaaaaagaaaactcctgtatgtggtggaacatatcctttctcaaattccgtgccatacctgccgaggccctggccgcattcgtccctgccaggataccgaataccagagccatcatggacataactaaaagcacggctccaatcttcagaatgtagccgatacttcccccgctcatccccttatcaatcatcagcgccatgacgccgggcaccagaacttccataagcacctccagcaccacaaaaaccgggcagagaagagatggctttttatactcccggactgagccaagcaatgcccggactgtcttttgatgttgtcctttcactgttaaaacctcctttttttgtaaattcccttggattttggggcaatttaaagagcctaagacggcgctgcctggtggcagccataggcccttccccattacttaagattcttcatcattttcatcccgattcggatgaatgtatccagttcttcctttggaatatcccgtgttatgaactgttccatttccaggatatccttaagcacccgtccttccagctcccatcccttttcagtgggaatgatttttttacacctggcgtcataggacgcctcctccctgtaaatcaggccctttcgctccatcagcttcagaatctccgtggccgtggggcggcgcaggttaaattcctcctctatatccttctgaaacaggtcctgctccctgcagcggccgagaataaagtgcaggattccattctgggcaggtgtcagccctcccacaccctcagcgctgtcaatcttgcgccggatcaggttggaaagggtggcgataaggcggacggtaggattaacagccatggaatttactccttttattatatgcagaaaaacagtttctgttagtcacctaacaattctaaggcaacctatccggtctgtcaaccaaattcacacaattgtaacggctccggcgccaggcaggaccggtccggtaaggttcaggagagttcccccatgatttgataaaatccgcatttacaacctggattttcctgctataattggtaggggtgtcttatcccaattcatactctgagaggttatcatgaaacacaattcacatcaatttcattgcggactaaaagacggcatacccatcggtctgggatacctggccgtgtcctttacatttggaatcatggcaaggggagccggcctcaccaccctacagtccgttgtcatgtcctttacaaacctgaccagcgcgggacagtttgcagcactgggaatcatacaggccggggccccctttatggaaatggcagtggcccagctcatcatcaacctgcgctactgtcttatgtcctgttccctgtcccagaagctgggcgcagacatgcccttcttccaccgtttctttatgtcctatggagttacagacgagatattcggcgtttccgtatgccggcccggctttttaagtcccttttacagctatgggctcatctgtgtcgccgtacccggctggaccctcggcaccctgttgggagctgtttccggggaactgcttccggcacgccttttaagcgccctgaacgtggcactgtacggaatgttcctggccgtggtgattccgccggccaagacaagcaggattctcaccggcgtcatcctggcctccatggccttaagccttgtgtttgcccatgtccccctgctggcaggtctatcatccggctttaaaatcatcctgctaaccatcctgattgccggtgccgcagccattctgttccctgtaaaggaggaaaatgaacatgaatcataatgtgtacctgtatattcttgtgatggcaggcgtgacctacctgatccgtcttcttccgctgaccttgattaagaaggagataaagaacgtatatgtcaagtcttttctctattacgtcccctacgtcaccctgtccgtcatgacctttcctgccattctccacgccacagcctctgtgtggtccggcgcagcagccctggcagtggctgttcttctggcctggaagggaaagagcctgttccaggtgtccctggccgcatgtgccatggtatttctgctggaactgtttctgtaaataaaaccatttcacatcccaggactcctacagcgacaatccgcctcttgcccttgcccgcctgtccatgatggaatggatgacaggaaccatgaatatggccacgattccgcctgcataaccgttattatacaggttcatgcccccatacacgattcccacattgagggcaacggaggaatgcaggtagcctgccacgattccggccaccacgccgaattcccctgccaccggcgcaagggtggtggagaataaaagggccagcatgggggatggctgataaatgttccatgtcttggtaaagctggccagatatacccccatcatcaccggagctatgttcctcagatgttttcccgtggccccaaagcccacaatggtgaagattccgcagatggtaggtccgttcagttcacctcccactgccagcacaaaataggtggcaaacagtccattgactcccatgttgaacacagtgctggcaccgccttcatctctcagataatctgttccgccgattccataggatttgataattcttctgtaagattcccagatgcttctgccccgcaccgcaaccccgaatacaatcattccgccaaacagtacggacagcacgattccaaagatctcattgtttcccgtggaccatatgagcctggattctatctccactccaagggattttaacactgacacaatgaccgtcgctatgatgcctgcggcaaaccccacattgtacaaagaatatcctttgtgtgcaaaatgcacatgagtggaaaggggcggcagcacaaaacctataatcagtcccacggccagggctatggccatccgcatcaccaccggcaggttgcccacctgcatcatctgggtgatgatgggcgaaaggctggtgccgtaaaagccaatataaatataccttcgcatggacgtcttgtgatacctggcgtacaggtacactccggccaaaatagcccagatgttaagcaggtttttgccaaacagcgaaaaaccgaacatcagacagctggaagtgatggtgtggccgtccatgtccatacccatgaagtagatgataccaatactcataagagtcagtgcaccggcgttgatgagggccgcccccacaccgcccacaacaaaataatccgtaatcagaaaatccggctcttttatcagacgcacgattcccggaccgatttcctggattggctgcagaaacagcccaatgaccataaaataaacaggaagcagcgacagcagaaaaaacttctgcttcctggtcagggatttcagttcatgaaaatgttccagatgtttcataaatacctcccaatcaacattctttttctatcataactgatagacccccggttggcaaagacattttttacttctattggaaaatttattattatgggttaggttaggcaatcagtggtgccatgcataaaaagcggcggacagccttcctcaagccatccgccgtttatcatctttttttcttcctttcctttaactgttagccgtcttacccagtctttgggttctctttttctccagcctgtctatgatgaccgtggcagacatgtcgcccagacagttcattgttgtggtacccatatcaaagaatcggtagaagccgcctaccataattacaatctccagaggaattcccactgctgccgctacaatcataagattcatcaggccgccgcccggaacaccggaaccagtggaggtaaccagagctgttacaaaaatcgtattaaaaatctgtcctggcgtgagggcaattcccatggcctgtgcgctgaacagaatgacaacgctgcaaagcactgccacgccatccttgttaatagttccgcccagcgtgatgcccaatcctgcaactgagtcttccacttcaaaattttctttggccacattcatgctgactggaatcactgcagcactgctgcaggtactggcggcagcagctatggtcggaaagctccttttcaagaaattcagaggggtaatgccggtaaacagccataaaatcaaacaatataccactatcagatgaaggatgcagcacaaatagaaggtacctaaaagcttggacatggtgagcagcagattgatgccgtattttcccagggcattggccataagacagaatactcctatgggagccagcttcagggcaatactgatgatggacattaccaagtccgccatactgacaaaccagttgcgcacaggcgtcctcttttcctcgggcagcatgacaatggctactcccataataactgctatgattaatacctgcatcatatttgcattgttaaatgttgcaaaaatattgctggaaaacatatctgtgaagaacttacccacagcaggaagctccgctatctctacagcctccgcactgccttctgtaaactggaaacccacacccggatggaacactccggttatcaccagccccaggaccgatgccgccactgtggtaaacatataaaagaccacgattcggataccgattcttcccagagtcttaggattatccatactggtaatcccctttaccatcatgcagatgacaattggaacaaggaacattttcatcagattcagccagattgttccaataaaaccaatgcaggtagccttttcccccaacagtatgcctagcaatgatcccagcagcatggctataaggatttttgtgatatcattcatcttattatactttttcaacatttgtaatcccctcctaatagaaatacgttagatatattgaagcactccgctctctgatacagccagcagttttccttccttgtaataacacctcgccgtgtgggacgaaatctcaatccagaacgaaggcacccctctcccccactcttccatcctctgctccatcgtaatctcttcatctccctgtctgccaagaatgacaatttcatcccccaccttggcatccgggaaatctgccagatctatgatggtatgctccaggctgattgtgctggctactttcgcctttcttccgtgaagaagtacatatccgccggccagctttggactaataccgtctccaagtcctcctgccataattccaatccgcttaggcgaatccagttttaccgctttatagttctccccaaatttacctccacatacctggtttatatgtataagccggctcttccatgccgtaatcggatgctttaactgcggatgcccctccctcctgtcaagaggtgaatatccccagattgcccgtcccggacacactccggtcatacggatttccggcagtgcgattcctcccggtgtattggccagctggcaaaatggtatcttttttccttcctctcccaacgcttcaattgcagcggagaaccgttcatattgccacagaccgtattccgctgacacatccggccagtttactgctgccatatgactgtatacaccttccacatataggttgggtaatgctgtgattttcctgtaaaagtccggaaattcttccgcgtttacgcccagccttccccttcccgtatcaattttaacaaatacaggtacaggtgaggaggctgcatctgatatggcttttgcctctcgttccgacagtatggtgggtattaaatgatattggatgtaaagctctgccacctcctctatggtattgctggcgaaaacaagcagtggcatctttaccccattttccctcagtttaatggcctcgctgatactgcccataccaaggtaatctgcaccgcacgcctccaactcctttccgcacggtacgattccgtgtccataggcatttgctttgactgcgggcatcactttcacatccggccccaccatttttttaaatgcaaaaaaattgtctctcacgttatccagactgatctccagccagcaggaacgtttcaggttatatccgtccatttcttaacactcccctattttctgttttctgtaataattaatcagacatcctgcgagcagaatatcccgttctgtctccgtcaatccttccaatgcaagcgtgatgcctcggacattgccgtcacttcccagtgttcgggctgcaatacatttctttccttctaacagagccttgcgtataccctcaataaatatataatccccctgtacacagtcaaatttttcccttccatccagagtaaaaggaataatgccccaattaatacaattactgcggtatctctttgttgcatactcgaaacagagattggcaattcctccaagaaccttctgacaggaggccgcttgctctctggccgaaccgtcccccggtttattggcaaacaaacaggaaccgtaaccagtacctgcaatcatgtcttcatcaataccaaatcggttcatcacctgaaccagctcctccggcatttttccctgttttctctcctcttccaccgcctgaatggaccgacagtacccggcataaccgggaacccttctgcacagcgcatattctgccagacggataggattagaccggtaggaagccgtgtcgccggaaggaataagttcgtccgtggttgttaccgggtcatgtatgactgcggaaaacctcatcagtatattatcatgcagttcatccataggtggccaatccacgatattagggccggtcactaacctcacagacgcatcagcctttccatacccgtaataaacccgcttcttatacacagtcccgtcaaaacagtactttaggtccggtatctggtagtccaaatccgtggctgctgtaataacaccctgattggcagcagtggctgctatggaacgtgcatccatgagagctactgcgcagtattgcccctcatccggtctgcttccttccctgttaggaaaattcctcgtagcatgacgaatggaaaaggtatgtgtagctgggatatccccatagccggaacaggaaccgcagatacacggtttcatgattgctccggatgacagcagtttctccgctgcaccggaacgaatcagcgccaggttaaccggcatactggccggatatacagtcatggaaaaaccatcctttcccaaagtggcgtcttttaatatctcagccgcctcctgtagattctcaaacaaaccacctgcgcatcccgctatgctgccctggtcagcaatcacccttccatccttaattttatgggaaagctgaagcttattcttcccaaagagccgttctgcctcctgatccacctcctccagcagttcttttgccctctcgttaaactcatgaatcgtcaccgcgttgctgggatgaaagggcagggcaatcattgactcaatgcggcctaagtcgagatagattacaccgtcataataggctggactcctggccttcaacttcctgtaatccccgggccttccatggttcctgtaataggcttgggttatctcgtctgtctcccatatggaggacaggcaggaagtttctgtcatcatggtatcaatattgcacctgtaatccgctgtaagattcttaagtccggggcctgtaaattccagaattttgttttttacagttccgggcttaaaaagtgctgccaccatagcaagggccacatcttcaggtcccacacctctctttgtattcccggtcacatagcagagtaccacctcaggagatggtatgtcataagtccttccaagcagctgctttaccagctccggtccaccttccccaaatcccattgttcccagggcaccataccttgaatggctgtcagatccaagtatcatgccgccgcacgcagacagttcctctctcgcatatgcgtgcatgacagccaggttggccggaacataatttccgccatacttttttgctgccgtcagcccaaacacatggtcatcctcgttaatcgttccccctaccgcacaaaggctgttatggcagttggtcatcgcataaggcacgggaaatcccgtcattccgctgcttctggctgtttgaatgattccaacataagtaaggtcctgggatatcaacgcatcaaattttatctgcatcctgtccggttcctctgatatgctgtgtgcccgcagaatctgataagcaatggtgttctccctggcatcatccggttgtatcccggcttctttaaccagacatccgttgtccaggtatataccatccatctgtatatcaaacatctattatccgcctcctttctcatacttgtataagaagcaaatttaatgccaatttttttaatctttttttcattatatttgaaccattacacaagtctttt

SEQ ID NO: 3132 - DNA, 108694 bp, Unknown
  gut microbiota DNA sequence
tgtggtccatatcctttccccgttacccatacccttacatttataaagtgatgaagttccttgtgttgaattatcatatcattattaccaaattccgccaatcccaggggggatgcaatccttaaagaaacgattcagccgttctattaggtgagatcaaatgataataaaagcgaaaaaaggcatccctctgcggaatgcctttttactgaactgccggctgcaacgccatcattctatccacttttataaaagtccgtccctacgactccccctcctcaaaataatcccttatcaaattcgacaaagtaacctccgcccagctatactccggcatgtactccccgacgaaaaagttagaagccccctgaacctggcggaccatatcgtagctgtcgcagaccacagcctccttattaatggcataggttcctctgcccttcaccacaatcttctcaatcccatatttcttcaatgtctgcttcagtctgtgccacgctaaatggacagcctgtttggctgcggtttcgtcccgttctccttcatttaaaatctcagccaggtgagataatgttacttcctttccgctccagtccacaagtattgcgagaagttctttggctttgctgctggaaaagtatatcagctcaccttgataatacaaatcaaaaccaccaaaggtttttacatataccttatccgatgttatatcaaacatgattcatgctcacctatcatcccgtattcaaagagaatctgcttctctttgtgtgctcctatttgtatcctcctcagccgtcaggtcctatttatatgttaacataaatgtcattgtaagaccagttgtatatccatgaaaatacaaataatgcccctccatattttacctaaaatatgtattttttcaactggtttattatatttgtgattttaatctgcctccgcaatgttagtaaccacctgtgttaaaaataagtggttaaaaaagaaaggctccgcttccattccgcggcgcccttctttttcactatggtccttcgtttcttatcctaaaatcctgtatacccaggtgtcagccgcagcttcctcagggctgccgcctttaccgcacctgcatatctcttttattttcccaccaccttgtacgtttcctccacaatacgctccatggcgttgagaatgttttcataccctgtgcatctgcacaggtggccggatatcagcttgcgcagctcatcgcggttataccgctttccggtacctacgatctccaccgctgtcatgatcagtcccggcgtacagaaaccgcactgaactgccgcttcctctataaatgccttctggatggtgctcagctcgccgtttggcccttttaacccttccactgtcatgatgctgcggccctccgcccacatggtcaggtagatgcagctgtctatggcctctccgtccaccagaaccgtgcaggcgccgcactcccctacttcgcagccctttttcacactggtcagtcccaggcggttccgcaaagtctccagaagggattctcttgggtccactgccaactccacttcttttccattaacagtcatatgcactatgttaagcatcccactcacctcctgcattgattacggcctgctttacggcacgccttcccagctcctccaccagctgcagcctgaactccctggaagccctccagctggaacgcggatttacttcctccagagcgccttttcccacagcctgggccagggcctcccctgtttccattccctttacagcctcttccgtcgtatggcagcggatcggagtgggcgcagccaccccgtatgccaggcgaaggtcctgtatgtgtttcttatcctctgtcagcttcacgcttacagcgcaccccagggtggctatttccatggcatttctcttgccgtatttgatatattgaccgccgtagccctggtagttctctttctttatccggatagccgtcagcacttcatcgtgattcctcacagtccttcccggcccggtgtaccactggctgatgggcacctccctgacgccgtcaggcccctcaaggaccaggaccgcatccaggcagcacaggctgctggcgctgtccgcgctggtcacgccgttgcacacattgccgcctatggttccgatgttgcgcagctggggaccgcctgccatgtccaccgcatctcccagcatgggaatatgcttctgaatgatgtcattattggtaatatgggaaaatgtggtggccggacctatgacaatggttccgtcctcctccattcttatgccctccagctccttaatcccgtgaatgctaaccagggagcagccggccagctttccctccctgattttaatcagcacatcgctgcctcctgagatgaccactgcttcagggtcttccactagggcgcgcaccgcatcttccacatctgctgcctgataaaattttccgatatcatacatgctgtttcaccgccctttctatattaatcctgcttccttgaaatgcttcaccatcttctgtggatccatgggcagactgtccactgcaacgcctgtggcgttaagaactgcgttgcgcacagccggggcaaccggaatcgccggcggctccccaagtgccttatttccaaagggacctgtgggatcatccaactccacaaagagtgcgtttaagtccggagtatccatggctgtgggcagcttataatccagcaaattgtcgtttaacggtctcccctttgcgtcaaagagcagctcctcgctgagtccgtagcccagtcccatgctcatgccgccgtgtacctgggcagcagccagcttggggttaatcagttttccgctgtcatgtacattgacgatattggtcaccttcaccttgcccaaaggcatatccacctccacctccgcaaagcaggcaccggtggcaaatgtattggtcttgcaatggctggtggcctctgccgtgatatgtacggagcggtccaggctgtaaaatgccgtggtggccagctcctccatgggcagcagctgcgttccggtctccttatccacaatgtggttatccctcacatccagggtatcctggggcttctccagcatataagcagcgtaatccagtatcttttccttaaatatagcgccggttttcttcactgccataccgctgacataggtctgcctggaagcatatgcgccggtatcaaaggggcttacgtccgtatcctgggtggacagcacatttaccttatcttccgtgattccggtcacctctgccgccatctgggtaaacacggtgtcggcgccctggccgatttccgttgcccccatctgcagctgcatggagccgtcctggttcagtatcatgcggcaggacgctgtttccagggatatgggatatacgcctgtcttatagcagaagatagccataccgattccctttcgcacgggtcctgtctggttttcatattccctgcgtttctcatcccagcggatgaattcccggcccttttccatacattccgccaggccgtatgtattgcatttcacatgagtgtgggggtcaacgtatcccggcctcatgcagttctttttcctgaattccaacgggtccatgtgaagggccagggccaggtcatctgccatgcattccgcggcaaacgctgcctggggaattccgtatcccctcatggcgccgcccgtggccagattggtgtacacagtccaggcatcggactccagcaccttctcatccttgtaaatctgcttgaactcattggaggagttggctacgatggcatgggcatgggacgcgtatccgccctggttggaatatgcctccagcttcctggcaaccagcgtgccgtccttcctggccgctgcctttaccttgaactcgatggcatggcgcaccctggtacatcccagagtttcttccctggatatctccatccttacccctcttcctcccacctgggtggtaaggaaagcatttaagggctcatagagtacatcctgcttgttgccgaatccgccgccgatgtagggctttatcacacggattcggcccatgggcagtcccagcgcctggctgatgacacggcgcacaatatgggggatctgcgtggatgtggtgacgatgattcttcccttttccatataggcaaaggagatgggcgtttctatgtggcagtgctgcacgctctgggtccggtagtccttttctatctccaccagtccctcctccttcactgcttccccgtaagtcccttcgcccaccacaaaagaagaatgggcgataacatttcccggtttttcatcgtgaagtcgggatgcgccctctgccatggcgtcctccacggtcagcaggggagcatactcctcatactccaccttcacaagcctggctgccctggctgccgctatatcgtcctccgctatcacggctgcaatatcgtctccatagacccgcaccctggtattgagaagtttcctgtccgcaatatcctgatgggccgtttccacggaccatggatggccgggtgtggggaactggatgtccggcacatcgaagcacgtaacaatcttcactacccccggcaccttccgtgcttcttccaaatcaaagctttttaccacgccgttggcgatggtgctgcgtattacctttgccaccagaagaccctgtggctctaaatcggctgtatacctggcactgcctgtgactttgtcaaatgcgtcaacgcgggtcatgtttttaccaattcccatggtgtgctctacctccttatcctgaatgcgcaaacgcctgtattccaggcgtctgcattatatgctgctcgttttaaattaatacatacttaagtacaaataatatagccaatatatacatcagaaggctgattttcttctccttcgcatggccggttgcaacgttgataaccacgtaggagataacgcccattgcaataccttcggaaatgctgtacatgaaaggcatggcgatgatggcgatgtagcttggaattgcctctgtaaagtcgttgaaatcaatcttcaaaattgagctgatcatcaggaaacctacgataatcagggccggtgccgttgcaaaggacgggatggctaagaaaatcggtgacaggaacagggacagaccaaagaatatagctgccactacggatgtaagtccggttcttccgccttctgcaacgccggaagcgctctcaacgaatgtggttgtggtggaggtaccgaatacagcgccaagggaggtaccgatggcatcagacagaagggcgcctctaatcttaggaagctttccatccttatccagcatatcggccttggatgccacgccaatcagtgttcccagtgtatcgaacatatccacaaacaggaacgcgaacatgatggttacaaagttcagggacaggatgccgctgaaatccatcttaaagaaggtgggcgccatgctctggataccgaaaccgctggaaaaatcaggaagtacgctgaacattcccagctctgcatttggctggtacagccctgtcacttcgcagataatacctaaaatccatgtgatgagaataccccagaggatgtttccctttatgttcttaacaaccaggataccggtaataagtacgccgataagggccagcagtacagtgattccaacagaattaaatgttcctgcgtccagagagcctttgaatgaaaatacggatacaagggtggcgctctccaccacgattttagcgttctgcagaccgataaaggcgataaaaagcccgatacctgcggatactgcgtgtttcagattcatgggaatggcattgaaaatagcttcacgcacattggtaagagacagtgcgataaagataaggccttccacaaatacggctgccagagccatctgccaggtataacccatctggagtactacggtgtatgcaaagtaagcattcagtcccatgccgggcgccagcacaaaaggataattggcaaatgcagccatcagcagggtggcaaccagggatgcaagggcagtggctgtaaagacagcacctctgtccattcccgtggcgctcaggatgttcggattcactgcaaggatgtaggccattgtcatgaacgtggtgataccggcaattacctctgttttgacatctgtgtggttttccgacaggtgaaatactttttccaggaatccctgatttgatttgttctccatacttcatacctccttgaattcatacctatagttttccgctgtttctattttaaagaacggtacccctttccgcccttttatgtatctattcaattttcatttaaaacatcttctgttaaaatatctttctgcccgccacatacttggcgtcaatatggcgctcatccgagaggtaaatgaaccgctccagccgctcctttaagctcagaggctgaggatgcttaaggctctcgtcgttcagcaccagcgcgtctaactcatatccttcctcaaagcttccggcctttccgaagaatccgccgccgccctttgttcccaggtagaatgcctcctctgccgtaaggggcttgcatgtctcatccaccagtctccagcgcagcttcgacacctggatggcgtcagccatggctctgaacacggactctcccgctcctccggccacatccgtgccaagtcctgtggggataccctgttccagataggtcctgacgggcgcaatgccggaggacaggttggtgttggactggggacaatgggccacgtatacgccgttgtccctcattctctgtatttcctcttccggcggccacacacagtgggccatgatggttttcacgccgctgccgaacatgccgaaatggtcgtatgcatcgccgtaaaactcagaccacgggcaaagttccttcacccagtcaatctctcccttgttttccgacaaatgggactggaccggaagatcatactccatctgaatcttcttgagctcttccatcagggtgtcggagcaggtgggaatgaaccttggcgtgagaatgggagccgtgttcctgtaccgtccctttatgtcctccagccattgtctggtctccctcagggattccgctgtctcctccaccaggatatccgggctgttccggtccatgttgaccttgcctaccatggtcttaagtccggtctcctccatcaaatccatgagaagctccgtagcctccctgtgcatggttgcaaatatacaagcccttgtggttgcactgtgtttcatgttttccgcaaatatggtatacgccttcccggcatactccatatcgctgtacttggcctcctctggaaacgtccgcgtgttcagccattccaatagttcaaggtccatacccagacctctgaatgaatactgcggggcatggagatgaaggtccgtaagacccggcacaatcagcctgtctccataatccgtcagaggaaagcctgcatacatctgcggaagttctttgtacacgccggctgattcgccgtctgcacataccagatatccctgttcaacacaaatcagtgtgcgggaatcctggctgtagcagatattgccctttaatacaaaattttctgccatatgctcctccttttccgtgatacgccggtgaccggcgcacccttgtattcacccgtacagcggcgggcccgggcttctatctgcatttttttgcaaacaaaaaaaccaccgctgttcctaaggctccacatcagcctgtctccggcgccccgggcagtacctgatgtgaaaacttatagtcaactattacggtagttggtagaaacgctcaacctatcttgagcatatataagttttgaatacttatacttctattctattgcgtcatcttctgacatcttgagtctatcacaatagacaactcaatgtcaatatatcttgtgttttttgtgcattttctacattttgtataaaataattggcagatatatgaaattcctcctttttctttgtgcgaaaccaatattcttttcaaaacataacgatgtggttaatatagatccgccagacggaggagctgtcccaaacgtgtccggaacgccggatggtttacggctggcatatgccgttttacggtgtgattttgtttattccggttaacagaaacagtataacagcagaagaaacaggccggttatgaacctatgcaaaaaaccagaaggaactctccatcaagaaaatttcctcctggtttttttacatttttaaagagaaagagctgtttggtcatctgtttaaatgactttcccccacgcatcccatcctctgtcaccgcgccaaatcgtctgccaagcgcttgatcttctcccgctccccaatcacaatcaccgtatcctcgtcctggaacacataatccgggcttacatctgtggtcagccatccgcctctggtgatggcgattatgttgatgccgtaccggttcctcagctgtgcatcccgcacagactggcccgtaagcttcctggtggtctttatttcagatatatccacgttctggtccagctcaaagagattgaatatgcgcttggagataagccttctggccaggcggactgccatgtccctttcaggatataccacctgggctccgattttctccagaatctcgccctgttccgggctgttggccttggccaccacctggggcacacccagattgattacattgagagtggtgagaatgctcacatccaccttgtcaccgatgcagaccaccaccacatcgcagttctgtattcctgtctcccgcagtgtctccttctgcagatcctttaccacatacgcatgttccgtgtagtttctggcctgcctgattttttcctcgcttctgtccagcaccataagctccttatccgcctctgccagggttgccgccagtgcgcttccaaaccttcccagacctatgattccataggacattgcctctgtctgttttcgtgccatatataaaacctcctctatccattcaaaatgtgcttaccgctatttcacttatcttcccctatccgatggaaatgcttccttccgcataggatacggatttagtgggtttgaatacccaaatcgtcacaatggtcagcggccccagtctgccgatatacattaccagcacctccagaagcttgctgagggagctgagtcccggcgtaatgccggtggacagacccacggttccgaaagccgatgtgatttcaaacagaatatcctcaaaaggaatcccaggctccaggatacacatgaaaaaggttcccaggcacaccaccagggccgacagcgccgtcacaatggctgccttgtaaaatgcctcctggggaatccggtaatggaaggcatggggctcctcattgcaggcagcacctttgatggtatgaaacaaagtaaataaggtgctggtcttgatgccgcctcctgtggaccccggtgaagcgccgatgaacatgagcacggaaacgctcagcagtccggcggaagtgaattctcccagaggaaatgtggaaaagcccgctgtcctggccgatacactggtaaagaacgcgcccagccaggtaatatcctctgtcagccaaatcagtactgtgccggatgccaaaagtatcagggttgtcacaatcaccgccttggagtgaaggcacagctttttaaaggagcggttctttatcaaatccatgatgaccaggaagcccagccctccaaatataatcagtcctgccgtagtcaggttcagcagcacattgtcctgatatcccgtcaggtttttaagtccccccagtatatcaaatcccgaattgttaaacgcggccacagagtggaacaggctgatgccaaccgcctttaagggcggataatccctggaaaataccaggaagcttaagacagctcccacgccctcaaaacaaagggtggtaatcagtacatttctcaccagacacacgattcccctgccggaatccaggttaagggcttcctttaccagaaggcgttcctttaaattcaccctttttccaagagccagaatcacgcccacgcccactgaggtcacacccagaccgccaatctgaatcaaaagagccaccacggtctggcccagagccgtataggtatcggctgtgtccacggctataagaccggtaacacacactgcgctggtggatgtaaacagagcatccacataatgaagcctgactcccggctttatacacaccggcagcatcagcaaaaaagatcctgtaaggataacggccagaaaaccaatggcaatgattctggccggagactgcctttccagatacttcatataatcacctcctagtgccttcaagcttaccactaagggcataaagcaggtataacggaaccgcctccggtataaagattatataaatattatataaagatacagtcatttaacccaaagatatgatatactgtccgggtagacaatgaaggaggtttttcattccatggcccattcccgaatccttgacaccctaaaaaccatggcagtcctggccgcagccactgccattggattcctgttagaaacccttggcctgtcccaggccaacatcattaccgtatatattctgggagtcctggtggtggcggcagtcacagccagccgctggtacagcatcagcgcttccctggccagcgtactgctgttcaactacatatttacagagcccatgttcgtcctgaaggcagaagacgcaggcacccagcttacccttctgattacatttctggcagctgtatttaccagttccttcaccgtgcagatgaaagaaaaggcacggctttcccaacaggatgcctaccgctccggcgtcatcctggacaccagccagatgctccagaaggccgctgcaccggcggatatcctgacctgtaccgccatacagctgaacaagctgctcaaaagggacattacctgctttgaacaggatggagccggccttaagtcccccctttgtttccgtgagtactcttctcccgcaacaggaaggggaccggcccctgacaccttagaggaactgactgctgcccggaaatgctttcaggagggaaaggaaacaggggctgccacagggctgtttcctgcagcagcttaccacttcctgccccttcaaagctcaggcgctgtctatggcgtcatgggaatccatgtgggcaccacacctcccggagactttgaaaacagtctggcagtagccatcatagcccagtgttccatggcgctggaaaaagaatatatttccaggaagcgggaggaggaagcggccatggcccgggcggaacagctccggagcaatctgctgcgttccatctcccatgacctgcgcaccccgctcaccagcatatccggcaatgcaggtgtcctgatgagcgatggggagaacctgtcggccgaacaccgtagccggatatacagggacatatacgatgattccatgtggcttatcaatctggtggaaaaccttctgtccatcacccgtatggaaggccagggcgtccacctgcacatggaaaccgaattgctggaggaagtcatagacgaagccatgcgccatatcaaccggcgtcacgaacaccacaccatcagggtaaatcaggtgggtgactatatcctggctgacatggatgccaggctgattatacaagtcataaccaacctggtggacaatgcggtgaagtacacgccggaaggttccaccatcatggtaaacagccgccaggaaggcgcctctgccgtcattgacgtcagcgacaacgggcccggtattcccgatgaatcaaaggaaaaaatttttgaaatgttctataccaccggccacaaatccgcagacggaaagcggggcatgggactgggactgcccctttgcagggcaatactgagcgcccacaagggcaccatcgaagttttagacaacaaacctgccggaagcatattccggcttacattaccagccaaggaggtatccttacatgaataagccatccatcctgattatagaggatgacaaagcagtgaaaaatctcatcgccaccaccctggagatgcacgattaccattatatatgggcggataagggagaacagggcatcctgtccgctgcttcccagagacctgacatcatcttactggacctggggcttccggacatggacggagtggacgtgattcttaaaatccgttcctggaccaatacccccattattgtcatcagcgccagaagcgaggacagcgacaagatagcggccctggacgccggggcggacgactatttgaccaagcctttttccgtggacgagcttttggccagactccgctccacccagagacggttaagctatatgcagtccctggaggaagtacagacctccctgtttgccaacggcgggctgaccattgactatgcggcgggatgcgcctgcctggacggggaggaactgcacctgactccctatgaatacaagcttctctgcctccttgcccacaatgttggaaaggtcctgacccactcctacataacccgggaaatatggggtgcagcctgggaaggggacgtggcctccctccgcgttttcatggcctccctgcggaaaaagattgaaaaaaatccctcacagccccagtacatccagacccacgtgggagtgggttaccggatgatgaagcggtaagggattatacagccaatagatgaaatccgatggaatttatgtcattatttatgtcatgaaacccttcagagcccagtcatatgtatccatggcctgctggaagcctgtgtctgccctttctttggcagcggcggcatccatgtaggccgcttttgcctccagatattcctggcgcgacagcattcccagggccagcttgttggatgctgcctggaacgcggcttcctgggatgccatggacgttgctgcgctggtccagagtgtctggctggccaggacatcctgatacagtgtatccagctggccgtacatagcctcctcactctggcggatatcccgctggcgggcatggagttctttattggagctggctcctccgctcctctgttccctcagggaataattgttgcccagcgcgcgccatttgtcggtgctgcctcccatttccaggacacgctcaggccggggcgctggcatgggaccgacttctgcctgggagccttccggaattccggtgagaatgaataattccttcttcacccgttccatttcgtcctgtacagcctttgccttggcagctgccgcatcagcctcttttcctgcctgatccgcctgggcggcagaggcgcttcctgtctggacctggcgcagcagcttctcatactggctctgtttccactctgcctgagccaaagccgcctcctgttccgctttaagggtattataggtgcccataagattctgggctgtccagagtacggtatcctccatcctgcgaagggacatggacgcctggctgccctgggcagagcgaatctgcttatccatatccttggccgcatcctccagggtcttggcctgggcccggtactggccggcactgtctttgtccccgttcttctccaggtcctcggcctcctccctgagaagacgtctggtttccatgatttcctctctggcattctcgtaccgcgccaggcggctgtcatactgcgcctgttccatctgtatctgggggctgctggcttttaccagcgtctctaactcctcataacgaatgacatcgggcattgcatctgcatgggcctccagagggtacaggcaggcaaagaagaggcccatgaagagcagtaagtattttttcaccatatcctatgccccctctgtctgtgcaaggccgttgaccgcccatctgtaatcctccagggcctgcctgtatttcaggcctgccgtgtcgcatgcggactggctggaggccatggttccctgctgctgtgtatattcatttttggaaatcatgcccaggctgtatttgcgctcggctgtctgggccccggtacgggccagctccagctcgcccgccgcctgttcataatcagccctggcctgctccaaaagcttatatctggcttccacatccgcctcaatctgcctgcggccagtctccaccttctggttcatcacatcccactgggtcccgttgcctgtaaatgtcagacggcgctcattggctgtctgggtaaagttctgctctatggccctttccttatcaaactccaagtcaatctgatccatctccccggcatccggcaccggcacttccctgatatccggctgggcattgtgatcccaacccgtcatgacgcagagctctctgcgcagtccgtccctctccctgtcattggtctccagggctgcctgggctgcctccatcttttcccgggccccaagcagctcagcctgggtagccatgccctggcctgctttcactgccatggcctcatactttgacctggcctggttcacatcctcctccagggcaggacgggccttggccttctgccagtaggatatcatctttgtctgggcatcctttacaagaacagcctcctgtctgtcgtactccagcttcttcacccgtccgtcctcattctgtgaatcagccagctcctggttctgttcagcctgcaggcgggcgcttatggcccccaccgctgttcccgcgtatcctggctggtcctcattgacggaatccattatcttatcgctggaatcatagagcctgtcagcaatatcctggtaggcatttttcatttcatcgtggtccttgcccctgtagtcgtcgtattccagacggttattgataaccgtggcattgtattcgtggaccaggtcagccagctccccgtattccagcacatcatccctcagcgccgcccatttgtccgcagaataggcaaactccggactggcccatgcagtcaccggccgcagcatacccggaaccggggccagcatcagggccaatcccatggctcctgctctcttccatgtaccgctcatccgtctcacttgctttcctcctgtctcgattcttgatttcctccggccgtatccttgattttctccggccgtatcctacgatatcctccggctgcatccttgatttgctccgtcgggatatcccgtctattcgtaacgcagcgcgtctatcgggtctgccttggctgccttggatgcaggatataatccaaagaagataccgaccactgctgaaaatgacactgcaaccacgatgacccccggttttatgaccaccgcaaatcccagaaggaatcctcccagggatacggttcccactcccagtatgacaccgataatgccgccgcaggctgataatatggctgactccgtcaaaaactgtattaacacatccctggtccttgctccaagggctttccggatgccgatttccctggtacgctccgtcacggacaccagcatgatattcataatgccgattccgcccaccatcagcgaaatggccgcgataccgcccactgccatggacaggctgcccatcatgctgtctactgaggtcatttcctgcatggccgtatacatgtacatatcctccggctgcctgccgtgcatcttggccgcatatgccttgaactggctgaaaaactggtccaggttcacatcgtcctttgcatacacatgaagctggtaaaaatagtcgttgggccaggtcagaagggtgtatggaatgaatgccgaccccttgtcatcgctgttgcccatcatcagggcctggaaggcgttgacctccttgcggtacacacccaccaccgtaaagtcgtcggtagagccatataaggtggttctgaaggaccgcccaaccgcattctcagtgccgaacagcatctgggcgctcttggtatccatgaccacattcttccttcttcccaggatgtctccctcgttgagatagcggccgtacaccacgttcaccggctgcacatcctggtaattgtagtcaattccctgatagtcaaatttaatcttagtccgcttatactcggcatcactgctggtataggcactgctgtctatataggcgacctggtccttaaaggcctccttgacccgctccatctcgtccagggtaaaataatcgctctgccgcacatcatctacccagtaaccaatggatatataggcctgggtaatacccacatccttgtataaatcagagaaaagtccgcgcatggtatctccgatggacacgatggctatgacggaaccaatgccgatgatgattcccagcatagtcagggcggaacgcatcttattggaccggatggctgaaaatgccatcttcatgttttcaatcagcattctgctctccccccttcccgtcctcagaagtcaccctggccgcattcaatttgtcactctgtatctgcccgtcgctgaaccgtatcacgcggtgggcaaaggctgctatatcctcctcatgggtaaccagcaccacggtagccccttcctggtgaagctttgtaaacagctccatgatttccaccgaggaggcggtatccaggtttcctgtgggctcgtctgccagaattaagggcggttcattggcaagggctctggctatggcaaccctctgcctctgacctccggagagctcgtttggcatatgttccttcctggctcccagccccacccgttccaatagcagctgggccctgaccgcccgtttggcctttggcaccctggcataggtcatgggcagctccacattcttaagggccgatgtcctggatatcaggttaaaggactggaacacaaacccgattttccggttcctgatatcggagagctggtccggcgtcatgtctgccacgtcaatgccgtccaggtagtaatgtcccagggtgggccggtccagacacccgagtatgttcatcagggtggattttccggatccggagtgtcccatgatggccacaaactccccccgttcaatggtaaggtttatcttctttagtcccagtaccttaatggccccggtatcatatatcttgaccagattctccagcttaatcaggggtccgtcatagacctcttccttaatcatgctgtccctgtgtaaaaacttcatccacttcttcatacggcgcctcctgctactgggtaatcaacacggcagcaccgtccatgagatggggtcccggattggtgataacctgcattccctcctccagcactgtaccgtctgtgggaatgacctctaccaccacgtcgccgtctactcccatggtcacaggtattcgtttaaccttcatatcctgcacaatggctatgtatgtcacttccccgtcgtcaaaaagcgccgatgagggaacgacgaaaacatcctttgcctccctgattaaaagttctgcttttgccgtgattcccgcaataagctttgagcttccaccgtccacccgtatggtagtgggaataaccctctccgtggatccgccgcctttttcctcgcctgtgggcgatatctttacgacctcgccttctgcagtctcaccgtccaggatatccgctgtgatggtcgccatctgtcccacctttaccttgccgatggagaactcgcttaccttgatttccagctccagctgctccagattctcgatgctgagaataggtttatcatcctccaccttatccgcaaactggcccaccttggaattgacacggaccacagtgccgtcaatggtgctctttatctgggtattatccagttcttcttttttcttttccaaatcaaaggctgcgttctgtatctgtatgccgtaggacgaatctgcaacgcctctcccattctcaaccgtatagccttccatctgccttctggcgtcattcagggcattggcgctggcttccagctccatctgtgaaatgtcgccggtggcaaagagctggctgttcctgctgtgatccaggctggccttctggaaatcctggaccgccttttcgtatccaagggctgcttccttatctttttcctgcttattagccaccgcaaggtcgtaggcgttctgggcaatctgcacttcccgctccagatccgtgctgtccaccacggccagcacctgtccttttgtcacggtatcaccctccttcacattcatagcagtgatttccgcatgaatattggacaccacatccacgctgtctgtgcctgatacaggaccgcttaccgtaagcttttcctgaacgtcctgtttggcaaggggcatcacggcaaccgggatccccagatccttctttcctccggacatacgggagaacccaaacaaaaccactgccgccagtaccaggaccgtgattatcttgcgcttacggctgaaccccttaaagcgccggacggggtgaaagcctccctccgatgaccggtgtccggtcttttgcttttgctttttcttctttttctttccgtttacttcctcctccggagccatcagctcctccacgcgacggtcaatttcctcagactctgaaatgccttccaaaacctggatttcctctaaatcaccagcttttttctctgttcccatgactccctccttaataccagcggatactgtattatttatattaatacagttatatcacatatggcatacttatacaacaaaaaataaacatttgcgccattgctgttcatttaataaggctattatataggtttgccataaatatttcatcctgtattttcataacatttcataaatgaaaacgaaagatttacttaagtttttcagccagattaagaacatatgtttgattcaccggataaatagcgtaggctgataacaataaaaaacgaggaggattatatttatgtcaaggaccagtattacatgccgttatttttatgtgggacatggctccatgaatctgctggacatacgcaaggacaaccagaccgtatgcatgatgctgatagatgccggaaccagacccatggttcccgagccgcccgaggaactattattctatgatatgatacagaacagcattagcactgtgtcggtgcaattgaaacaagccctcgaagcggatgtcccggtctatgtattcgtgacccaccatcatattgatcacttcaattttcttaccaatcagctaagaacattcgtagaagcggcttacgccatatatatcccatgtcccccctctgatgatgcctggggaccagaggaccgggaattgtttctcatggcgcagcaaatgcagatggatggaaagaatgttgtgttcatacaggatgtgctgcaggcgggccgtgaggatagaatgcttgaaatacccttgcccgatatcttagaagactccgtccagatgtgctgctggaccccctatgcaggcagtgaagggttaagggaacccaactccgtaggcaccatttacggaatcaggatgaaagaggaacataatgcaatgttgtttacaggtgacatggatgcaaccatgatgtgcgccatccagaggaattcctgtgtgcaaatcagcatccgcaactttttcgaaaggattcctgattcccctccccacatcataacagtcccacatcatggttcctaccactccctggttcaggaatccggaatggtgggctggactcttagtctgaatgaaatcaaggaattgttcattaatatgaatttatatgacgcaatctatgtaataagcgccagcgccaattatatggacgaacacccccgctatgagactatccggttctttttggaaaacataaggaccaaaccattcagtgctaaaaaccatgtctcggatttcgatatttttggtcgaatcattgtattggatggtgagcaacgctatcattatgtctatctctcccccatgcacctgtcctgcactttttcacatataatgaaaaggaatgcttctgagccggacttatgggcggaatgtaatcccagggaactgattgacaaggtatctgattttgcttgcatccacattatataactaacgggcgcatacctgacgggctgtctgccccgggtacgcgcccgtccatcttctaccattattcaagcgctgccttaagacgccatatcatctcatccacatccgccttctcaatcaccagaggcggaacgaaacggatgatattggtcccggcgctgattaacaccagcttctgctccagcagcgcttttgacacaatggggcctgccggtacagagaactccaatccctgaatcaatcccattccccggtgtgccctgatgcaatccagttcctttgacagctcctccagcttctcgtagagataggcgccaatatcctttacatgttccgtgatacggcgtttctcaaaaatatcaagcactgcgctggctcccgccgtcaccagcggattgccgccataggtggtgccgtggtcgcccggaaccatggcgctggccgctttgccccatgccaggaaagcgcctacgggaagcccgtttcccagcgccttggccactgtcatcacgtccggcttcacgccgtaatgctgccaggcaaacatttccccggaacggcccatgccgcactggatttcatccagtataaggagcaggtcatgttcatcgcacagggccctgaccccttttatgaattcttccgttgcaggatagatacctccctctccctggatggtctccataatgaccgcacatgtcttactgttaatcagcttcttcacgctgtccaggtcattgaaatcagcgaagcggattcccggtataaggggcttaaagggctcctggtagtgggcattgccggtgacggccagtgcgcccaggctccttccatggaaggaatggttcatggcaatgatttccccggtcatgtccggctccgcgtcctcgcagccgtcgcagccgtctcccatggtttcatgaagtttgttatagtgatagcgctttgcaatcttaagagctccctcaatggcctcggtaccgctgtttgtgaaaaacaccttatccatatgggatacctgaagcagcttctcgccggcctcaatggagggctggttgtagaacagattggagatatgggtcagcttgtgaagctgttcctccacggcctttgtatactcctcatccccatatcccagcgccatgaccgcaatgccagcaccgaaatccagatactcgtttccctctgtatcgtagagcttcactccctccccatggtcaaacaccacagggaaccggttgtacaccttataaagggcctgttctgcccgttccatcaactgtttatcagccatgataatacctctcgtcttcttcggaattatagatagcggttccaatacccttgtcagtaaagatttccagcagcaggcaatgaggaatacgcccgtccaggatatgcaccctggatacgccgttttttatggcgttgatgcagttttgaagcttgggaagcataccgcctcccagcattccgctgtccacaaaattctgggcctcctccaccgtcatctcggagataagggaggacttatcctcataatccttatacacgccctccacatccgtgagaaaagcaagcttttccgcctccactgccgttgcaatggcacaggccgcgtcatccgcattgatgttatagctcaggaaatcctcatcaaagcctatgggacagatgatgggcagaaaatccttttccagcaaatcatatatgattttgggattcacttcctccacatctcccacaaacccgatgtcctctccgccggcgtatttcttacggcatttaagcatcatgccgtccttgccgctgattcccaccgcattgatacccagctcactgaccagctggaccaagctcttattgactttattaaggaccatctcggcaatctccatggtgggttcgtctgtaaccctgagtccgttcttaaactgggcctccattcccaccttgcctacccagcggctgatctccttccctcctccgtgcacaatgatgggcttaaagcctaccagcttaagaagcaccacatcctgtataacctttttcttcagttcctcatccaccatggcgcttccgccgtattttaccaccacgattttcctgttaaaacgctggatataaggcagtgcctcaatgagcacggccgccttctgcattggttccaaattcattttcatactcctccttgtgagcacttagcgcctgtccttcaggcgcttacgtgcgatacatgtcactggcacttggcgaggtctttttcgagcttagtgcagcggctcgttatgagcggtaatccgcattaatcttaacatagtcaaaggtcaggtcgcagccccacgcagcggcctttgcatcccccatcttgatgtcggccacagccgtcacctccggctctgacagtatccgggtagcctgctcctcgctgtagtccacggccacgccgtccttaataatctgcatctttcctgccgcgctctcaaaaaacaggtccaccttttccggttcaaactgtgccccggaataacccatggcgcagagtatcctgccccagttggcgtcatggccgaagatggctgccttggtaaggctggagcagattactgattttgccagaatcttggcctgttccttagtctctgcccccactacctttacctcaaacagagcggtgcagccctcgccgtcgcctgccattttcttggctaatgtttcgtttacaatctttaaggctctgcagaaggtatggtaatcctcattcttctctgtaatttctttgttgccggccagaccgtttgccagaaggagaaccgtgtcattggtggatgtgtccccatccacggaaatcatgttgtatgtatcctgtatatcctggctgagtgcctcctggagcagctctttgctgatggccgcatccgtagtcacaaagcttagcatggtgcacatattgggatgaatcataccagatcccttgcacatgcctcccatggtcaccgtggttcctcccagctcaaaccggacagccacctccttgttctttgtatccgtagtcataatggccctggatgcgcctgtgccgctctcaaggcttccgtccagcaaaggagccatggccttgacccctgccgtaatcctgtccatgggcagctgcatgccgatgacgcctgtggatgccaccaggacgctttcagcagaaattcccagggccagggccgctgcctctgctgtctgtccgcagtaccccatgccttcctctccggtgcaggcattggcaatgcctgcgtttataaccactgcccgggcaggcgccccgcttgtcacctggttcttatcccattttacaggagctgccttcacaatattggtggtgaaggttcctgccgacctgcagggctcctggctgtaaatcatagccatgtcctgacggtccttatatttgattccggctgctgttgaagcagccttaaagcccctggcagccgtgacgccgccggttatgattttgattcccatgcctgtctcatccatatcactcattcctccatttatttccatacctttatgtcatatgaagatgcacctgcctttatcacggtgcaccatcctttcattttaccgtacaaaccgggtgatgttttcctcattcagtatgaattcgtatgtattcacatcctcccgttcctgccacccgattccctgccagaacgcatttcccacctcattacccttaaacgcaatcaggctgattttgctgactccttccttctgaagggcctccatggcaaagcgcaccatgcggtatccaatgccgtgtttcctgtatcccggcgccacgcacacatgataaaaacaaccggtcctgccgtcatggccgcagaggatatttcctataatatgaccgttctggacagccaccacactggtagtgggattcctcccaagaaagcgctccacgccctcccgtgaatcgtcaatacttctgattccaaagcccttgatttctgtccacaggccgtagacctggtcgtaatccgctattgtcatttcgcggataaggatatccattgtacctgccatgatctcatatttcctttctctttccctctttcatccttttcagagatgtctttaaaccaacagcctgaaccatcaggggaaaatgggaatctgcttaagtcccgtattctccggcaggccgaacatcaaattcatgttctgtatggcctggcctgccgctcctttgaccatgttgtctatggctcccatcataaccacccggttggtcctggtgtctatcttgaaattcacgtctgcaaaattgctgccctccacccaccgggtctgaggcaccacatccttttccaggacgcgcacaaaatattcatccccataatatttatcgtatacagcctttacctcctcgcaggatacttcctttgtaagggatgcataggctgtcaccaggattccgcggttcatgggtaccaggtggggggtgaagctgatggttaccggctttcctgctgcataggacagctgctcctctatctccggcgtatgtctgtgggaggccaccccgtaagccttaatgttctcattgacctcgcagtacagactgtccaccttgcttcccctgcctgcgccggatgtgcctgacttggcatcaatgataagggtattggggtcgatgagcccttcctttaccagaggataggtggacaggaaggagcaggtggggaaacatccaggattggcaatgagcctggccttcttcaccttttcccggttgatttcaggcagcccgtatacggcctcaccgataaactgcggggatgcatgggtcagcttataccatttctcataaaccgacacatccttaatacggaagtcggcgcttaaatcaatgacctttactttagataatacgtcctcgtccatcagggaggcgcacagtccctgaggggtggcggtgaacaccacatccacctgatctgccagctccttcatattatcatccatacacgcatcgtccacgattcggaacatgttctggtagatggatgcatatttctggtctatgtagcttctggaaccataccatttaatctctatgtcatccctctggagcaggagccttgccagctctcctcccgcatatcctgtggaaccgataatacctgccttaatcatatccgtatctccttatatttataaatattggctgctgccttcattatagtcagtttttctttaaatgaaaagaagcatttctgtgaaccctgtttcctggttcccgtttggatttcataattatacattataaatgcataatatgcaacatcttttaaatatttttatttagcacttgcattttatcacataatgttgtatatttatgaaagttcaatcagtacagcaatctcaggaggatatcaatatgaaagaaaaagtagttttagcttattccggcggactggataccaccgcaatcattccgtggttaaaggagcattttggttatgaagtcatctgctgctgcattgactgcggtcagggcagcgaattagacggactggacgagagagccaaattatccggtgcctccaaattatatatcgaagatttagtggatgatttctgcgacaattacatcatgccctgcgtaaaggccaatgcagtatatgaaaacaaatacctcttaggcacctccatggcccgtcctgccattgccaagagactggttgatattgcacgtaaagaaggcgcctcagccatctgccacggcgctaccggcaagggcaatgaccagattcgttttgagctgggtatcaaggctctggccccggatatcaagatcatcgctccctggcgcatgaccgatgtatggaccatgcagtcccgcgaggacgagattgaatactgcaagcagcacggcattgacctgcccttctccgcagacagcagctacagccgtgacagaaacttatggcatatcagccatgagggcctggagttggaagatccgtcacaggaacccaactacgagcatctgcttgtacttggcgtgactcccgaaaaagcaccggatgagggcgagtatgtgaccatgacctttgaaaaaggtgttcccaccagcgtaaacggacagacgatgaaggtttccgatattatccgcaaattaaatgagctgggcggaaaacacggcatcggcattgtggacatcgtggaaaaccgtgtggttggcatgaagtcccgcggcgtgtatgagacaccgggcggaaccattctcatggaggcccatcagcagttagaggagctggtattagaccgtgccaccatggagacgaaaaagaccatggctgataagctggcccagattgtttatgagggcaagtggtttacacctctgcgcgaggctgtccaggcatttgttgagtccacccaggaatatgtgacaggcgaagtaaaattcaaactgtacaagggcaatatcatcaaggccggaaccacatccccttactccttatacagtgagtccctggcttccttcaccacaggcgacctgtacgaccaccatgacgcagacggcttcattaccctgttcggactgccccttaaggtaagggctatgaaaatggctgaggtggaatctgccaaaaagggccagtaaagagacaggatgcactgttacacataaagaaaatgccccggagatattacattttccatctccggggcatttctttatgcctttgccatcttagccgcgctattttatctgttgaaactgtttcattgattcattctacttttatttatacgactttgcagctttatgatgctgatcagattggccaggatttcaatctcttgggaaaggactcaatctgtttccatggaaagacagcgccgtgtccgctgttctccccctgcattcgatccgctcaggagcaaggttatggataagggaatccggcccggcattggctttcctgaatttccttagagcctttttaacttgaaaaaccggtaatatattaaaaaatatacgaatatataaccttaaatctgcatagatcctcttcttttttccaaaaaagtgtcgaatatataagatagtatgtatattaaatccatcagcacaaaagaggggtaaaaggaagatgaaaagtataaaaggaaaaattttattatgcatgtcactgactgttgtcatatgcctgagcattttagggggtgcaggcatctgtctgaattacagcagtaccaatcagctgttggagcagacgctcagggaaaccgtcaaaatcgcgtccgacaaggttgcaaatgaacttacatcctatcttaacgtggctatcgacacaggaaccattgcgcggctgacggatccccagcagagccctgggaataagcagcttctgattgatgacaaggtaaaacagtacggtttccagagagggaacatcatagggccggatggaatcagcgcccttgacggcaaggactattctgaccgggattatttccataaagccatggccggccaggccaatatatccgatcctttggtcagcaaagtcaacggagaattgtctattattgtggctgctcccttatggaaggacggacggcctaatacaacaatcgcaggcgtggtgttctttgttccgcagagtacatttttaaatgatatcgtttcacaagtgcacatcagcgataatagtgcagcttatgccatcaattcagatggttataccattgcggacaacaccgccagcacaatcatgacacaaaacatagaagaggaagcgaaatccgattcatcactggccaggctggctgccatacatggaaaaataagaaagggcgaaagcggctttgacaaatatgaaattaacggtgtgcagaagctggccgcctactctccaatcgccggcacagacggatggggcatggccatcacggcacccacatcggattttatgggagcgacccttacttctatcggaatcacatgtgctctgttagtaatatcactgattgctgcagtggcaatcgcttattggctggccaagaaaatcggcaatcccatccacatctgcacggaaaggatccagaaactgtcggaaggtgacttaaagtcacaggtacccgtcatacattccaaagacgaaacgggcagactatccgaagccacccgtctcattactgattccataagcaatattatcaatgatattgactgggggctgagccagatggccgcaggtaactttgccatcaccagccagtcccaggatttatatgtgggggattttaaaccactctccgactccatgtacaaaatattaaaggagatatcagcagttttaaggaacattgaccagagtgccgagcaggtggccggcggctctgaacaggtggcggcaggagcccaggcactctcccagggggcgaccgagcaggcgtcctccatagaggaattagctgctactgtaaacgagatttccaatcatatagataaaaatgccggcaatgcgaaaacagccagcgaaaaagctgcctctgtaatggaccaggcaaaagaaagcagccagcgcatgaaggaaatgctgacagccatggatgacatcaatcaagggtccggtgaaatcagtaagatcataaagacaattgaggatatcgcgttccagactaatatcctggcgctgaacgccgcggtagaagccgcccgggcaggagaagcaggcaaagggttcgcggtggtggcggatgaggtacgcaatcttgcgggaaaatccgccgatgcttctaaaaatacatcatcactgattgagggatcccttcatgcggtggaacgcggcaccaaaatcgccagtgagacagccctggcgctggacgaagtggtaaatggcgttgaggatgtatctgcggccatcaatgagatttccgcggccagtgcagaccaggcgtcctccgccagacaggtcacacagggcatagaccagatttccagcgttgtccagacaaattcagctacagcacaggaaagcgcggctgccagcgaagagttatccgggcaggcccagatcctcaaaaatctggttgggcagtttaagtttggcagcacggaagccggggaggagcccgtgatgccggtcccagatgagtccaattacatggttcagggatgtgatgaaactaaatattaatattgcaggaaagagccggctgctcctgccgccaggaattctccttccccgccgtcaatccagtcggatcttgtttttctccacatccagcccctccggcatattggcaatccggatccttccgtcgatggtgaccggctcaagcactccgttttcactatggctctcaatataggcaatcaccgcgtcaatgatgttgggctgatttctggcccagtccgttatctgctgatactgctcgtcataggtgtccgtactcaggtcaaataacctgcatgcgctctcatttccagggtcaaaggtctggtagagggcaatcccctcaggcagctgagccggcttgtccggtggtaacaccgtaaacgcgtcccagccgtcgcttccccccagctcataatccgtggtcgccaccgtataccaggcgtcagggtctatcgtttctccgtttgacaggcggacatcgctgatttccgcctgtcccccatacgcattatcctccagcggttcgtaggtaatggtataggtgaaaccggagggaatcaccatgccgccgaacacactggactggtccgctctcaccgcatcggtcaggttattggtggaaagtatggatatcaggttcgcgcccttgcagcgcacagtgaccacatggttgttcaggccgtagagcatggaggtggccaaatcagactctgttatctccccttcctcaagctccgctgtcagagttcctgcattgatggcggccagatctgcgcccgtgtactggcgcagggcatcagccagcaggtttcccagagctgattcattggagcgggaaaatatacgcacataattgtatgtcttatctgtcttcccgaccacatggtccgggacctggtaacggtttttccctgtagtgcggtattcttccagcgcctccagcatcccctctgtgccgccaatcttcatgtaggagctggcgccttccagacccgcataatagttctgtccgcacaggtaatggcgcagggcaaaggtaaacaaatccgaaccgtaaaactggtaaggatttttcacaatggagtgttctgtaaggcactggtaaaattcaggatgggtattctgaaaataatcataatttaatgtgtcatcccgccggtagtaggtggtagcgcccacgggaaccgaagcactgtaatattccggcgcaaactctgtggaagccacatattccagatacaggcggcaggccctgaggacagtctcgtctgttatgtttgcattgattcccagataccagtccccgttggtggccagccagcgatcctccctggttcttcccatatatggtatgaatacaaagtcctcggccttcacccatacctgtttgccgtccttttctattttaaagcttgggaccccgttcacatccctgagcttctcttcaaaatgaaccgcatagtccacatagctcaccgaacacatgactgcgtttccccgaaccacctcccgcagattctgtttgctgctcatcaggaagtcgccgttctcatacagccccatgctttccagctcatcaattcccttaaggacacgggcaaatgccggattttcaaaggaaacccctgccggattattccggtacagattcagccactgcacatattcgctgtccgtgtacgcatccagaagaaagggcatggccaccactgctgctgcgtcattgtaaagcatcccaaaggcataggcccgtaccccggtctcctcccttctctcctgaatccggcggcagagccctataaactcttcctgtgtccggggcatatcatatcccatatccgccaggagctgtctgttcaccatcagccctgagatatacccgtttccaaccggaagggcatataccttaccccctacctccgcatcatttaaggcgctgatcatgtagttcttcaaaaatggttcggaggtcaaatccttcagataaccgctctggacataggtataataatcctgtgtatagaggatttccgggccgcctccgctgcgcaccgctgccagctgggcattctccatctttggcgctatttcatatgtgctctcaattttaactccgggcatcgtgcggtggatataggcttccgcctgctccgtattgatattctcacccatggtattgtacacatgcagcacaaccggctcctcagccggcggcgcaccgctctgtttcttatcctctgtggccccggtatcccaaacggccgtgcatccggtagcagcagatatcagcaccagcaccagaaacagccctattcccatccgtttcttcatatttattctccctcttccccgggtatggttttcgtgaatcacgtttcgctgccgtaccgggtatcctcctgtccatccccacagctctggccgtaccggctgccccagccgttcagggacagcccttttagcccagcaggccccgcagctgttccatattgatgggctttgtcagtacagcgccgaatcctgcccgcgccgcctctgaccgcacttcatcctcactgctggatgtaaacgcaaagacaggaatggatccggcactctttctttggctgctgcggatagcggccgctgcctcaaagccgtccatgaccggcatgcgcaaatccagcaggatggcgtcatatgtgccgtccggagcattgagatatgcctccagtgcctggcgtccattttccaccgcatccacctgctggccgtcggcccgtatcagctctgccgctatctcccggttaagttcattgtcctccgccaacaaaagccgcagacagcggccctcacgccgcacccggccaatctcctttgccaggaccgcgaagtctatgggctttggaacaaaaccattcatccctgcctcaagggcttccctgcgatcctcctcaaaggcattggctgtcagggctataatagggatggacgctgcctgcggatggatgctctcccgtatcctgcgggccgcatccagtcctcccagaaccggcatctgtaaatccatgagaatcacgtcatatgtatcctcaggtgcatccagaaaacgggtgcatccctcttctccgttccgggcagtatccaccgccgctcccatgagtccggagagcatttccactgcgatttccaggttgaccgcattgtcctccaccaccagcaaacgcacgccttttaactcccctgccagtccgccggatatgctctccccctgtcccagcattccggtaattttccggtacaggctcatccggaacagaggcaggctgattgtatatttaaatcccttctgcttaatctcctcaaacagctcctgctcatccggtttcagtcccagaagcagaagcgtatccccgcctaaatcccgcttcagctgttctccggttaaggtccggtcaaagcggagcattttatagggaagaaatgccatggagaaaggacggcctgccgccctcttttgggccgccagggaaacagctgcctgatagtctgtctcccaggcagcatccacaccgatttcctccagcttttccactgcatccctgcacttttcctcacttcccggctcgccgatgaccagcatggcgcagcctgcggccagaggcacatggcggctgcttaaacggatggaaagcccaatggtaaaagtggtgccctttcccggctcgctctccacccggatggtgccgcccatcagatccacaatgcgcttggtaatggccatgcccaggccggttccctggattccctgtttataagaattctggtcccgtgaaaacatctcgaaaatccggcccatatattcccggctcatgcccacgccggtatcgctgacccggaatacaaagctggcaaatgaaggatcctgtgatggtacctccgtgatatccagatagatttccccgtcctttggcgtaaacttcaccgcatttcccagcacattggtaagcacctgccccaggcgcaccgtatcgccgcacagcaattcatgggtaatgttccagacattgacgtcaaaatgctggctgcgcacgcctgtctgggactgggtcaccgtaaccacgccggacagccattcacccagttcaaactctgtctctgccagctgcattttgccggattctattttggacatgtccagcacatcgttaatcagtcccagcagtaattgggaggaattagcgattttctgaaggcattcggtcacctttttgctgtcctccggtgaatatagggccagattggtcaggccgattaccgcattcaggggagtacggatatcatggctcatactggccaggaaagtactctttgcagcattggcccgtgcctcgctctccagcgcctcttccaggcgcctgcgggactgctcccgttccgtgatatcctccagagtcacagtgataaagcgctggctgctgtcctgttccgaaatcagataggcgttaagggacagcacgatatccttctggatgtcaggccgggtaaaatgcagcttcaggcttccgctggcacaatctcccttgcggacccggcttatcaggtccaggaccgcctggcggtcgctgccgctgatacagcttaagaacttatcttctatagcatttccaaatgcatcctcaatccccaggacctgttccgtgttgcgggacgcatactcaatagcaccgctttcactgtcagcaatgacaatcacattgggcacataatgggtcatcagggtgaaaatacggtcacggcgaacagcttccctggatgcgttggcgcgcaccacgaataccagcataattacaatcaccagaaacatgcccagcatcagcacaatgataaacatggtcagctggatggtctcctggttaatctgcgccgcgtccgccgtaatgtggtcataggagacacaggaaatgaaatcccagccggtccgcgggatgggcgcatacacaagctcatagcgggaatccccaaagtaaatctcggcgctgccgcctttatcgtccctgaaatcagagagcaccctctcatattccgtgctgccctgggcgtccggtgtaaagaattcctcattcatgggattttcttcaaaatatgtaaacagattcagggtctctcccagttcccggttcacatgggtgcgggagagaatcagacctgagtcagtggtgatcatataggaagcattgtccccgaacgcagtggaatcataaagggcccggaaggattcctggctgtaaattccaatcagtataacagagccagcgcggcaggagaatgccaccacatcctgccccgaagcgctgaacgggtctgaaataaagctgatcgcctccccgtccgggctgttcaggcagtccacataggcctgactggaatacaggttgatgggtttcacactatccccctggctgtagacaccgcggcctgattcattcagcagtacgcagtaatcgaacacagacactttgttaaaatccctgagataactgcggtccccgttgctgaggccgtcaatggagtcaaaaccattttccttcagttcttcggacatgccgattcccagcacgcgtatctcatgccggcaatggtcaaaaccttcggttgtcttggaaatcagggtgctggttgtctctttcagcgcagagatattggaattgatgatgcggtcgtagatgtccctgcggtatccttccaggaaataagataatgataagtaaaagacaatcgcaagggcgatacagactgtgatggttatcggcagagaaaacttatgtttttttcgtatctgtttcatctgccgtacctcgcttttccggaaaccatataactttaaacagctttgaataatattatattatttgggaagctatttgtcaattttacaaatacgcacagtgccgcctgaatatatctttatcctgccttaaatgaaaccggacccatgaagaagcagtctgttcttcatgggtccggttttaactgccattgagcagcagctgtttatgtctacagtgacttcacggctgccacaacgttctcaaccgtaaatccgaatttcttaaagagctgtcccgccggtgcgctggcgccaaagcccttcatggtgacggtggttccgtcaaggcccacatacctgccccatccgaaatcgcccagtgcctctaccgccactctcttgcgaactgcctttggaaggaccttctccttgtaatcctcaggctgctcctcgaacacgtccatgctcggcatgctgacaacacgcacatccacgccctcttttgccagttctgcctttgcacccactgccagctccacctcggaaccagtggcaatgatgatggcatccggaacttcctttgcggaatctcccagtatataggctccctttaatgcctccttgctggatccggccagctgcggcaggttctgtcttgtgagtaccagagccgtaggagtctttttggaagatacggcgctgtaccatgcagcagctgtctccgtggcatccgccggacggtatacatggaagttaggcatggcgcgcagcatagccagctgctcgatgggctcatgggttggtccgtcctcgcccacgccgatgctgtcatgggtaaatacaaaggtaaggggcacacccataagagcagacagccttgccattggctttgtataatcgctgaacacaaagaaggtggacacaaatgcccgcaggccgccgtgaagcataagaccgtttccgatagcggacatggccagctcgcggacgccgaaatgcaggttgcgtccggcatagttatccttggagaagtcccccatatcagccatataggtcttagtggacggagccaggtctgctgctcctccaatcaggttcggcatcaggttcttaagtttctgaagctgcttgccggacaggcttctggtagcatccggcttgtcctcaaatgcccagtagtcttcactgtcataaacatcattagccagattcggattatagaatttatcccataattccttcatctccggatatttcccgcagtattccgcaaataatgcgttccatttttcctctgtctcagcgcctctctcagcgtatgccttataattggcatatacttcatccggtacatagaaaggctccatagacggccagttcaggaattccttcatggcttttacattgtcatctcccagaggctcgccgtgagcgctggccttgccctgcttagcgggacagccgtagccaatctgggtctttacggtgatgaaggacggacgtgcggtatctgcctttgcctcctcgatggccttgccgatggcatccagatcatttccgtcctcaacggtaatcagctggaatccaaaggcttccatgcgcttctgcacgttctctgtaaatgcaatatccgtgcttccctcgatggaaatacggttggaatcataaaatacaataagcttgcccagtcccagggtacctgccagtgagaacgcctcggaggaaatgccctccatcatgcagccgtcgccgcccagcacataggtataatggtcaacaaccggatatccgtccttgttgaatacagctgccagatgggactcggccatagccatgccgactgccatgcccatgcctgcgcccagagggcctgtggtggcctcaacgcctactgtatggccatactccggatgtcccggtgtcagagaatccatctggcggaaattcatcatatcttcttttgtaaggccgtagccgaaaagatgaagcagggaatacagcagtgtggagccatggcctcctgaaaggataaaacggtccctgttctcccatcccggattcttaggattatggttcatatgttttgcccacagctcaaaggacatggctgcggctcccaaaggaagacctgggtggcctgatttggctttctgtacagcatctgctgccagaacgcggattgcattgactgacatggtatcaatctgattcatagttccctccattccggtgcccccaagggggcccacgcatcatagatgttatttttttaccaactgccctttattataccaattccatccatgcagggcaatactttttctcgcaaaaatcagtgcaacattttgcggttctttgcgttattttgcaaatttaaaaacaattgttataaaaagattataatttaaacacattttcatcacattttaattttaaaactgtttggtgaatatgtttataaaaaactgacaggaggacacaatcagtgattgaagtaaaaaatcttgtaaaagattacggcggccatctggcagtggaccatttaagcttccgggtggaagacggccagatatacggcttcctgggccctaacggagccgggaagtccactaccatgaacatcatgaccggttatctgggcgccacagagggccaggtcatcatagacggccacgacatactggaagagcctgaagccgcaaaaaaacgcatcgggtatctgccggaaattccgcctctgtatatggatatgaccgtggatgagtacctggaatttgcggcctgccttaaaaagctgccgaaagcagggcagaaggacactatacaggaagtgatggaactggttaagattacggatgtcagaaaacggctgatccgaaatctgtccaagggttaccgccagagggtgggtatggcccaggctattttagggaagccctctgttatcatcctggatgaacccactgtgggactggacccgaaacaaatcattgagatacgggatatgataaagggattgggcaaacagcataccgtcatcctgagctcccacatcctgtctgaagtaagcgctgtctgcgaccatatcatgattattgcccacggaaagctgattgccagcgatactcctgaaaacctggaacaacgtttaaaaggcgccgcgggcctggagctgacggtaaaaggcagcgaggaaacggtaatgcctgtgctggaggaaattcacggtctgtccatagagcgtataggggccggaggcgaggcaggcacctgtgtggtgaatctgcagtttggaggggatgaagatagcagtgtttcggggagcggtattggttccggcggtggcattgctcccggcggcggcattgcttctagcggcggcattgcttccggcgctaagacagatatccgcgaaaccattttttacgccctggccaatcaccgacttcccatcctgtccatggctccctccaaggcatcccttgaagaaatattcctggagctgacagaggactccccgaaattgcgggaggacaaaggcgtcacagaccccacagacccatcaaaggaggaggattcccaatgagagctatctataagcgggagctgaaatcctatttctgctccatgacaggctatgttttcattgctttcatgaccatgttcatgggcatttatttcatggtttacaatatgattaacggttacccctatttttcttatacacttaattccatcctgatgatacttatgattgcggtgccgattctgaccatgcgcagcatgtcggatgaacacagggcgcggacagaccagctgcttctcacctcccctgtgtccgtatggggcattgttatgggaaaatttctttccatggtcactattttggctgtccccatggccattgcctgcctctgtccccttatcatccgaagcgccggcaccgcttatctgaccgaggactatgcatctatactggccttcttccttttgggatgtgtgtatattgccattgggcttttcatctcctcccttacggaaagccagctcatagccgctgcagggaccttcggcatactgctgctcagcatcctctggccagggcttttaaactttataccggctgccgcatcaggttccctggtcggtttccttatcctgtggaccctggtgtgttttatcctataccggctgaccggccatatccccctttcccttggactggaagcagccggagcggcagtccttataggaacctttttcgtaaagcagagcatatttgaacgggctctgaccggacttctgggaaaaatcgtactgacagacgtatttgacggcattgtcagcagccatatgctggatgtcagcggtcttgtctattatctgagtgtggccggtatattgttgttcctgacggtccagtcaatcgagaaaagaagatggagttgaatcatatgaccagaaaatgtaaaaaaggcagctatatggcactgttcacccttgtggtcattgccgctgtcattgtactcaatctgatagtgggaaagcttcctgccaaatacctgaaacatgacttaagttccaacaaaatccttaccctgggtgatacaaccagggacatcctggcacagctggacagagacgttaccatccatattgtggccgatcccaactcagtggatgagaggattacatcctttgtgaatctgtataaggacctttccccgcatatttcggtggaagccaatgaccctgtgcttcacccggatgtacttgcttccctggacacagagcccggcaatctgattgtatcctgcgagtccaccggaaaaaaaacatccatttcatttgacgatatcatccagtttgaccccatggtttactaccagtacgggcaaatcaaggaaaccgcctttgacggtgaaggacagattaccagcgccatccgctatgtcacaagcgatacagcggcgaccgtatataccctgaccggacacggggaaaccgccctctcgtcagccgtctcagatgccatggataaatccggcatgaatgcagccgatctgaatctgctcacccagggagccgttccccaggactgcagccttctcatcatgaacgcacctgtcaaggatatctccgcggatgaaaaagaaactctgaccgattacctgaaaaacggcggccgcatgctgctccttgccggctgtacccaggatacattgtccaatctgacagatttcatttcccagtacggaatggacctgaaaaatggatttgtggccgacccggctccccagcattactacaacaataatccctttaacgtaattccggattacgactttgccagcagccttctctcaggagttgattcctccgcagcggcccttctggttcagcctgcgggtatgaccatacaggaaaatccttcggaggacattgcggtccagcccttcctgactacctctgattctgcatttttagtggatcctgccacgcaggaaaagacgcagggcacttatgtgctgggagctgtggccacggagactgtaaacgaggaagaaggcacatcctccatgcttaccgtcatcacagcgccaagcatgattgatgattccatcctgtcacgtttccccagcatcaccaacctgactctgttcatgaacgccgcggccagcggactgcccggagtcacaccgctgtccatccccagcaaaagtctggatattacctataatatggtaacatccaccggattgtggagtgcgctgtttattatcgtgattcctgtcattttcctgattgcaggctttgtgatctggctgaagcgccggaagctataaatcacgtttatacgcatcacatataacatgtatcgcacgtagtgaccggaatacggtcacttacgtgctcataaaaaggaggttaaacatgaagaaacatatacggccaatggttcccgctctgggagccctggtccttctatgcgcagcctacggcattatcacctggcatcaggggaggaatgctgaatcacaggccctgtcaccggaaaatgcttctgtatatatgaccgaccttccggagctgtcttccctgtcctggacaaaggacggcaagagtctgtcctttacccgggaaggcggtacctggtattataaaggggatacggactgccccatccgccaatatcccctgaccaccctgtcagatactctgtcccacttaaaagctgagcggaagctggaaggcgcggattctccggaagcatatggcctggataacccttccgtacggtttgataccgtttcctctgatggttcttctcactctatcctggtgggaagccaggttcccggtaccggcggttcaggcccggacggttcccagctccccgcccagtattatgcagctatggacggggacagtcagatttataccatcggcagttatctgaccgaaacatctgccaagggactttatgattttgttgagacagaatcccttccccatgtggctggtgccgacatccgggaaatcactgtatccaggaacggacagaccagacggttctgtaagaaaaccgtggatgacgcgggcaatattgcctggtataaggactctgacgcggacgaggccaaccgcctggatgacaatggcgctcttaataatctggcggatgccataagcggtttgtcgttccagtcctgtgtatcatataaggcaagcgatgaggaattaggcagctatggcctgtctgagccgattatgacgcttacctggacatatgaaaacggagaggcggacggcgccttatcattggccattggaagttccaccgaagatggtacaggctactataccagaaaggatgattccagagccgtgaatctgatatcaaaagaggcggcagagcgttgtctcaatgctgcctacccaaagtaatgtgaattatactatgaagttgtgctaaattatgaaagggaaacaacaccgcatttctgcctgttgtctcccttttttataactgttctaatatatggattgcccttaagccccttccctgcgctcccccgcacctctgtcatggagcacaaagtggttcttctgaaaatccagtatcccctcagcccgcatcttactcagctcgctggacatagcgctccggtccacacagagatactcagccagctcctggcggttatggggtatgtcaaaatccctgcccccttttgccatggcctgctctgacagataggacaaaagcttttccctggtggtcctgcggcacacatgctccagtttgttttccagcttcacattgtgctccgacaccagacgcagcatgttgtgtatgaacctggtatggaaatcgcaggccagaggacaaaacgtgatcatccgctggtaattgaggaacagggtctcgcatcccccctctgccaccacgctcaccggcagcaccggggtcctggcgcaggaataggactggccaaagagctccccttcctttatatgatatatgtgttcctgatgtccccagaaattctcctggataacgcatgccttccccctcagcagaaccagcaccttattgacggattctcccatgcggaaaatgtattccccatcctcataaagcacctgctccgaggcacagcattttaacagggtatagagctcgtcatcatttatgccataaaatagcggagattttttcacaagaggcagccattcctccatattcgcccttctttccgttgcatttacaactcttttgctgtaaatattatataatcaagagatttttccgtcaagagggattttctgtgagataaaatctcattcagcatcaccggacatcatccatatccagctgttttttatatatcccaatgacttttttcatggcctcctggccgggagcccctatggtaaggcgcttctccacacaggtcttcatgctgatggcctcatatacatcctcctcaaacaccggactgatggccttgtattcttccaggctgagatcatccagggcaattcctttggcaatgcaagcaaggaccagctgtcccacgatgccgtgggcatccctgaaaggcactcccttattcaccagataatccgccgcatctgtggcattggtaaagccgttctttgcactggcctccattacctcgttccgaaagctcatagatgaaatcatgccggtaaacaaggccaggcatccctttactgtgtcaatggcgtcaaaggtaagctccttatcttcctgcatatccttgttgtaagccagaggtatccccttcatagtggtcagcatggataccagggcgccgtatacgcgcccgcttttgccacggatcagttctgcgatgtccgggttctttttctgaggcatgatggaacttcctgtgctgtaggaatcatcaatctccacaaaacggtattcgttggtattccatattatgatttcctcgcagaacctggacaaatgcatggagatagtggacagggcgctgagcagctcaatcaggtaatccctgtcagccactgaatccatggaattaagggtaggcccgtcaaatcccagaagctctgccgtgtattcccggtccagaggataggtggtgcctgccagggcgcctgagcccagagggcagtaattcatgcgcctgcgtatatccttaaggcgggagcggtccctggagaacatctcgaagtaagcgcccatatgatgggccagggtgattggctgggccttctgaagatgggtgaaaccaggcatgaaggtgtctgtattcttctccataaccgccagcagctcttccagcagttccttcaccagctcttcgatggcgtcaatttcatccctggtatagagcttcatgtccagggctacctgatcattgcggctgcgtcctgtgtgaaggcgttttcccgcctccccaatccgctccgtcagggtaccctctacaaaggagtggatatcctcatatccggaatcggatgatatagccaatttcccattatccaggtcttctaaaatgctttccaacccgcggataatatcatccctgtcctgttctgtgagaattccctgcttggccagcattttcacatgggctatgctgcccctgatgtcctgacggtagaatttctggtcaaaggaaagggattcgttaaaattgtgtaccagctgattggtctctttcgtaaaacgtccgccccataatttcatggctcttatctccttatttctaaatttcttttgtcctgtattcttgtttgctgcggctttcctggtttactgcggctttcctggtttgctgcggctttcctggcctgctgcagctttcctatttaccgctgctttcctgtttactgctattttcttttttctggccctttttgttctctttgcttttctttcttatgctgtatccgcttactgcacggttctttttcttcttccggctgattcccaccagcacagtgactcccaggacagccgcgctggctccggtaatccaagccccggtcctaagtccctccggttcatagaaaaagctgattcggtgggtcccttcaccgatatccactgccagaaacgtgtcaaacattttccgcggggtcacggccttgccgtccaccagtatggtccatcccttatcataaggaatgctggtatacataacgccggccgactcagcggtgatgctgcctgacaattccgtatccgtccatctggaaagcaccatgggattctggttcatttttccgtaaacagcttccagggcctggggattaaaacgccacacctctgcctgcagggtcgggctgccgtcatctcctgtctccaggcgaacctccacatccttgttgatacggcccagctccatgaagtagcccctgtccacattatcaaagctctcggtctgctctccgattacagccgtgacctcctttaccttcttattggtcacatacacatagtaatcgccggtttcctgggctgtaaatgtaagtttcctgccctctgtcacactttcgttgggaagcagtacatgctctgtatccagcacatcgcagagatcgttctggacatgggccggattcccggaatccaaaatccagtttccttccacatccgacggcaacataaatgccacgggcagggtaaatttattctcatacagccacatacttccttttctcgcggacaaatccctaagtccatcggcaggctgctggtccccgtatattccatagcgaacggacatcagactgtccaccagaggcgtgcttcctgtgatgctgtaggcattggtggagctctcacaccccatcctgcggaagaaatccgacagggaggcattggctgtggatgaaaacagggatacggacgggaaattcatccaggcgccgtcattctttgtctttctgtctgtcttttccacacgatagaatgtatccgacttaatattccacaccagatcctccacgtcctggttatctttcacataagaagttctgctggtggtagggatgctggttaccgcggtattcacagccgcctcaatggcaaccacggccagagcagtgagaagaatggcgtccagactccattttcccttgtggtacaggtaaatcagacctccatatatggcaatgaacaggagtgccgcatagaacacggaaaaatggtattgttccggattatccaccagcttctctgccagcaacacaaaggaaacagccccccaaaacgccaggcataccgatttccaggacatatcctccagatgaatataggcgtggtaacacataaacagcatcagtgcaatataaataaaagactgacggcagggaaggctgttgggatagtggaacccatgccagataaaattcagcacattgactgaaaagctggcgtaaaacagaaccagcatggagcagtacactgccttttccctgaaggtaatcttcctgctgcccaggtataaaaggaagaacataagcactgccacaccgcagtatatattgggccagtggtccaatcctatctcggttcccacatttcctatatgacgggcaatcatatcaaagatggaaaaataggatgaaaaggtcttagggaaatcaaaatcccctgacgccgtgacctgcagcgcataaatctccggcaaaagcaccaccgcggcaagaccacctgccagaagggaatagaaggcaaaccgcagccctgttcccatgaactccccaaagcttttgggcggattgagcgtcatctgcgcaatcacatagataaccatgaaaatgcaaatcatgatggaaatatagtaattggaaaggatggagaggcccagcgtaatgcagtaaagcgtccccttcttctcctttaccagctgctccagccccagcagaatcaacgggaacagcatgatgcagtccagccacatgatgttccagctgtaagcagccatataaccgctaagggcataaaaaataccaaaaaagcccacgccgaacttcttaactccaaagtgtttcttcagataccacgaaaagctaaggccggacaatcctgtcttgagaacaatgagtatggtcataaactcaatgataaacttcttcgggcataatatcagaagccagtttaccgggctggccagataataggcatagagcgcagaaaaattcacccccatgccgatatcccagctgtaaagcaggcttcccccatgggtcagcttatactggaactctgaaaaaaacggggcatactgatggtacatatcggtcctgagaaaacactcttccccaaatggaaagatacctctctgggcaaatatgataatcatggccaccactgggacaaaaaatgctgccacaagaccatctgaaggctttagcagccgaagtccgcgcctgttttctgtctgtgacatccctgtctctctcttatcgtactgctgcctgtcctgtccggcagtctcattctcttcttccattccgtattcgtcttcctctgatgtatattcgtctgctgtatatctatccgctatataattatctgcggcatatttatccgctgcatacttatctgccgcatatttatccgccgcatattcatctgcggcatatttatccgctgcatacttatccgccgcatatttatctaccgcatatttatctactgcatatttatccgctgcatacttattcgccgcatatttatccgccgcatatttatccgccgcatcatattccgaagcattttcctctgatgaatcatcaccgaaaagatacgcctccagtgtgccttcttccgttaaatattcctctgatgtcgttttatccccgccggaaaccggctcctttgagagcgcttcctcccgggctttatcctgcatggtcggttctggctgcacaagcttcaggattgcgtcaagctcccgttcaacccgttctatctcttcacgttccatcacagtcacctttctctattcaggcttattcttgaatatccagagtttgctgaaaatatagttcagtaccatgttgattacagaggatgtgaatttgcagaacagctcatacagcattcccctgtcgccgcctaatttcaccatgaccaccatgagcacccaggtaacggctcctgagaacgctcgtgcagccacaaatgcccccacttccttcacaaggtaggaaggccgcagattataattgcggaacacaataagcttgttcaccacataggcaaacagcacagccgccagccatgacatggcctgggacaggcctacgcctatctcaatctgcctcagcagggcatataccgcaaaatcaactgccgtggtgagaaacccgcatataatgtagcttacagtctcgtagttaacacattttccccataatttacgtaacattttctgctcctgccctgttccagagtgcacacacacaatccctggagcaataatcccttctattatatggtagcatcatggaattgtaaagaaaaaaccattatctgtccaggaaatcctcggctcccctggtgtaatggagttccccgtcttccgtaaggaatatgccgtagatttggtccatggattctatgagcctggtgccctcttccaatcccagtgcaaagcaggtggtgctcagtccgtccccgtccactgacctgggggaaatgatggatacctgggtcagcccattttcatatgggtagccggtagccggatccagtatatgatgatagttgacaccgttctccacaaaatgcctctcgtacacccctgacgaaaccactgacatgtcgtctattttcaatgccgccactgtctctgtatgagttgcgtacggcctctggagtcctattttaaaaggggcgccgtccggccgttttcccacgcagagcacatttcctcccagattgatgaccgcacttttcacaccgttttcttccagatatgccttcatctgatctgctataaaccccttggctatggcgcccaggtcaatggttgtctcatcattgagaaaggtgacctgtctgccgtccaggagcacgttttcatagcccacctttttaaggtccgcctcaatctcttcctcaggcggcacatgaggcgtctttcctgtaaaatcccacagggaacttaagggctctatggttatatcaaaggccccccgggacatacggcagtactccagcccctccgacagtacctgggctgttttctccgataccgtgatggtcctctcgcccggcctgcggtggttcagtttgtaaatctcgctgccctccagggttttgctgagcagcttctcatagtcggaacagagtgtcatgcagccgtccagaatggtctggtcctctgaatcgtataaggtgacggtgacaaatgtgttcaacaaaaaagacgacctggtgacaggatccgcaactttcttgctgcatcctgccagccaagccgtgcacatgataatcaaacctgctgttattattgtctttaatcctgtatttttcatgccttacattctagcacccgggcatgtaaaagtcaaggcagccccatcaggctttggtctcttccatgtactcatccatcacagcgtccagaatattcttaagtgtctctggcgctctgcctcccaccggcgtgccgtcaatctcattggcagccacacacagtttggtggatgatgtcaccagaacctcgtccgcatccatcatctccttcagggtatagggagtctcgcttacaggaatctccagtttcttacaaatgcgaatcaggtgggctcttgcaatgcccggaagaatcagattgtccgcaggagccgtgtagagaattccatccttcaggatatggcagttgctatgggcacattccgtcacacggtcgcctctgtggaacactgcttcctggcatcctgcttcctttgctttctgggcagccatgacgctgggcagcagattcagggttttgatgttgcagtgaaggaaacgggtgtcctcctgggtaagcaggcgaatcttcttgtacaggtccggtgttcccatgggctttaacataacccagagattggctggtacattctccggaaattcatgggttctgacagcggtacccctggttacctggaaatagataaacagatctccggtatccatcttattgaccaaatcctgaagcagcgccttcagctctgcctttgtgcacggcacctgcatcttgataaggcctgcgctgttgaagaagcggtcaacgtgctcgtcaattgcaaaaatcttgtaattgcggcagggacctgcatcgtatacaccgtctccaaaccagcataccctgtcattcatgggaacgctcatgttctccagttcgtcgtactttccattataatatccaagcgttttcatatatgtaatctcctttataataaaatattcattgaaacatgatgctaaaaccgctttttctcttcttccggtatggcggaatacatgtttttgatttccttcagaacgaaatgggtcctggtggcagacacaccgggtatgctcttgatggtgcggtggatgcgctccagctcatcggaggaggcgcaggatatcttcagcacaaagtcataatctccggtcagatagtagcagtccaggatattagggtgatccatgatcacctcggtgaaggagtcatggaacctgggatgttccaggctgatttccattagggctgtgacatcgttccccagggccttggcatccacccttaccgtatagcccttgatgatgccggactcttccatcttcttgatgcggtccagtacggccgatacggacaaatgaatggctttgctgatgtctgaggctgtctcccttccgttctcttttaggatgttcagtatcttatagtcaagtttatccatcttgtccccctgttattttagcttttcaaatgtgatttcgtagtatatactggtaggtggatagaatgcattttctgcactgccctcgccgtgactgcccggtacgcagtgcgccttgccgccgggctatgccctttgtccgggtcacaggcttcgtggacattataacacaaatcatccaggagttgtactatgaatctctcttatttgaaatatgcggtagaagtggaaaaaactgggtccatcactaaggcggctcagaatttttatatgaatcagcctcatctgagtaaaatcatccgtgagctggaacgtgacctgggctgtgacatcttcgacaggaccagccgcgggatggttcccaccaagaagggtgaggagttcctgcgctatgcaaaggcaatcctggtccaggaggaacagattgaggccctgtgcgtgaagaacagcgaaaaagccctggaggtgaatctgtgtgttcccagagccacctatatttcctatgccttctctgattttcttaagcatatggacagctgtccctctgtcaatgtacattacatggaaaccaattccagggacaccatccggggtgtgtcaggcaagacctttgacgtgggcattatacgctgtcaggccctgtatgaatcttattatatgaagcttctccaggatgagaacctggagtggaaggaactgtggcaattttcctgcaatgtccttatgtcccccagccatccccttgcctccagggacaagctgacttacctggattttaccgattacattgaaatcgtccagggcgacatccagaatccttcctttacctttgaggcccaggatgcctctgccaccggcggcaactccaagaaaaccgtttccatctatgacaggggaagccagtttgagctgctgcgccagctgcccggttcctatatgtggacctctcctgtgccttacggctgtctcacctcctcaggtttgattcaaaagacatgcagttatcccggaaacatccacaaggacctgctgatttacaggaacggataccgcttttccaaggaagaggaggagtttctccggtgcctttcacggatggtaagccgtctttccgattgacccgccgggcgcacgtacataaaagcccgtcagccccttcattgagcggctgacgggcttttcgtttactcttaaatcccgttttttcctatttagtttgttcctatttatatagtgtaatccgttttaccacgacccagagagaatcctcgccagctcactgtcctcgttcagtatgacagtcttattgtcccctttcatggaagccttaagggcatccagggatcgcacataattatagaagtcggcctttgcctcgtcattgtaggcatcgctcaatatctgcatgtatctggcctcgccctccgccttgatcttttctgcctcagcgttggccttggctatggtctcctttaccgtcttatccgtctcattcttaatcagggatgactggtaatcgccgtcagccgtatactgggccgcgatgttgtttcgctcagatatcattctctggtacacggactccttgttggaatcgggaagatccagcttctttgtctccaccgcatagatgtggatgccataggaatccatggcatcaccaatattctccgtgatggtcttagccaggttcccgtcacggcctgatataatatccgcctggttggtggaggaaagcacatttttgatggagttatataccacgttccccagcctgacctccgccttttccttgctggcgttcagggacgccagatatttcaccggatcattgatatcccatatgacgaaagaatcaacggtcattacctttttatcctttgtggttacatcgcttggatacaggtcggaaatcatcttatacttaggtatcttctgcacagactgcaggaagggaaccctgagggatggtcctgccgaattctctacccggaccacctttccgaactgaataatcagggagtactcgttggattttgtgaccaccagcggattgaaaatggtgacagccaggagcacgataacaatgattcccatgtttctcataaatttagtcaatgtcttcattactgtccacctccgttctggtcattgccctcatacaattcctcctggtcataggagccggactggctgccgctgtcggcccctgcctgatttgcccgtcctgtctggtccggctgatttgcctggctgttgtatgaacctgccaaagagccggtgctgctctgggttccggagacaaaggagtccaggggaagcatggtctgtgtcccgtctgatccgtttatgatgaccttaagccctggaaggatatcctccatggtctcatagaacatcctcttctttgtaataagaggatactttgcatattcctggtacatatcgttgaacctggatacctgcccctctgcctcgctgattctctgctggcggtaggcttccgcgtcccttgcagccttgtccgcctctgcattggctgccggtagccgctcggactggtacttcctggcctcgttgattttggtatccatgccctgtttcgcatcctcaactgccttaaacgcattgtttacagcgtctgtaggcggctgcgcgtcctggatggtcacattgttaatacccaggccgatgtcctcctgctccaggcgctcagacagcagtgccttcaccttagcctgaatctcggatttgccggtggtgatgacctcgtccacgctgtaggagcccaccgtatccctgatataggactgggccaggttttttaaaatcggaatggccgtgtcgctgtggatatacgccttaatggggtccacaatctggtactcaatgtaaaaatccacattcacaaagttaaaatccttggttatcatctctgactcagacgaaaccgttatcggattgttctcgctgtccgcatggttctgtgcattgtaatccgggtcatatccaatgggcatgcccttgatttccttggacatcttatgtaccttctgtatgaaaggcaccttgaacttgggtcccgaggtagtgacgctgcttggacggccaaaggtggtaagcactgccatctcgttctctgacagggtatagaaagaatcaaaggccgcaatggccagaacagccactgcaatggctatctttatggggcggagcatccgcttcatcctcttattgctttcttccccgttgtcaaatactacttccggtccctgatcttttttaccgcctccagttcccacgaacttcttacccatgaaaaaattcatccggtattcccctttctcagtcattttagagaagtataccataagtttcacataccggatagcatttctctccagtttccaatatttttataattccgttcgggagataccggaaaaggaataccggtattcctttttcatacctacccattccaggtcaaaggtgttaagatgtaatcgttaaagaaataacacaccaaaacaacattttacatatactgggaggtattatcatgagatttacactgccaagagatttgtaccatggaaaagatgcactggaagcccttaagaccctggccggcaaaaaagccattgttgttgtgggcggcgggtccatgaaacggtttggttttctggacaaggtagttgattacctgaaggaagccggcatggaagttcaattatttgaaggcgttgagccggatccatctgtggatacagttttaaaaggtgctgctgccatgcaggaatttgaacctgactggattgtggctgtgggcggcggttctcccattgacgcggcaaaggcaatgtgggcattctacgaataccccgacacatcctttgaggacctgattacaccattcagcttcccgacccttcgtaccaaggctaaattctgtgcgatttcctccacatcaggaacagcaactgaggttaccgcattttccgttattactgattataagaaaggcatcaaatatcctctggccgacttcaacatcacccctgatgtggctatcgtggacccggccctggctgagaccatgccaaagaagctgaccgcacacacaggaatggatgccatgacccatgcaattgaggcttatgtctcaacccttcactgcgagtatacggacccgttagcactccatgccatcgagatgattaacgagtatctgataccttcttataacggggatatggaagcccgtgataagatgcacgatgcacagtgtctggccggaatggcgttttccaatgctttgcttggaatcgtacactctatggctcataagacaggtgctgcatattccggcggtcacattgttcacggttgtgctaatgcaatgtaccttcccaaggttataaaattcaactccaaagaacctgaggccgccgccagatatgcgaaaatcgctaaatttatcaaccttcccggcaccacggatgaggaactgacagatgcccttattgcccgtctcttagagatgaacaaggccctggacatcccggcctgcataaaggattatgaaggcggaatcattgatgagaaggaatttatggataagcttccaaaggttgccgaactggccgtaggcgatgcctgcaccggctccaacccaagaaccatcactcctgaggttatggaacagctgttaaaatgctgctactatgacgaggaagtagatttttaactgcccccttttgtgttacactccatatatacggtttgtttttactgcccgaaaagggtgggaaagaattcgtctttcccacccttttcacattgctatttttacgctgccagaagctgttccatatagcgcagatacccgcacagccctgtaatgatgaatatttccagaaaactggtgataaagcctgcttccaggaggaagaggacggagcaggctgccatcatccacaggatgccccatgccctgcgaaaacgcatccggtcgcgggagctgagaaagcggaggaagccaatgatactgaaggccagaagcacaggtgaaaaaaaagcaagcagcacatggaggtctgccttcaggggatatttctccggcatatagggaatcataaccgccatgagaagaaaggctgccgctgtatacatcagggtcctgcctcccggattcctgtatcttcctatgtgaaaaagataacggacatacacacagtaatagatgccggtggcaaatccccacaccgcaaacagcagcttgttgccggtgcggttgcccaggacagacaggttggtaccggtccagctgtcaaaggaagccaggaatatggtcacgccgggaatcagataaatcgtgaagaggtcgtattttccttgaaaccgtacattccggccctgcatggtcctgcctcctttatcagatagtccctgctcttaaatctgtcccggatcgcctgctatccgcatatccgggacaatgaggaagggagcgcgcacatctgcttgcgatgtgccgctccctatcattatctgatgaagtgctgacttttacacttgaatcattttcctttgaaggtatctgacctccaattatgccattgtttttaaaagcttttccacagaggagagctttacgcagagtgcaaacagctcggcagccgttatcaaatcccccaatgtgggataggtgggcgcaatgcggatattgctgtcatggggatcctttccgtaaggataggtggctccggcagatgtcataaccactcctgccttcttgcatctggccacaatatcctttgcacacccctccagagaatcaaaggagataaaatatccgccccttggctttgtccaccggccgattcccaggccttccagctcacgctccaatatctcctccactgcctcaaattttggccggatgatgtctgcgtgctttctcatatgctctaccatgccgtggatatccttaaagaaacgggcatggcgcagctggtttaccttatcatggccaatggtctggttctttaactgggccttgatatcctccaggttattgtgggaggtggcaatggccgcaatgccggaccccgggaagctgattttggaggtggaagcaaacttataaaccaggtcaggatttccggccctcttgcactctgccagaatttcaatcaaatgatcctggtcatggtcatacaggtggtgtacgccgtaggcattgtcccagaatatacggaagtcggacgcggccggcttcagccttgcaaaacggcggaccgtctcgtctgaataggaatagccctggggattggagtacttgggtacgcaccagattcccttgatggaatcatcggaagccacaagttcctccaccatatccatatcaggtccatcctcggacataggtacattgatcatctcgatgccgaagtattctgtgatggcaaaatggcggtcatatccgggaaccgggcagaggaatttcaccttatccagcttgcaccagggagtgcatcccatgattccgtgggtcatggccctggatacggtatcgtacataacgttcaggctggaattgccgtaaatgataatggtggaaggattcacctccatcatatccgccagcagtaccttggcctcgtcaattcctgtcagcacaccgtaattgcggcagtctgtaccgtcctcgcaggtaaggtcgctggtgctgctcagtacgtccatcatacccatggaaaggtccagctgctccacacacggctttcccctggacatatccagcttcaggtcctttgcctgaaactcatggtactgtgctttcagatcctggcgcagtgaaagcagttcttctttagtcatctctgcatatggcttcataatatcctcctggctcactatattttctataaaatgtgtccgtcaagcatacatctgtcagccaccggtcaacattttcgtacattgtacacaagcatacaccaataaaagcattccgtcaatacaaaattttcttatattgtcaaaagatatacttatgcctttttctatctgtctctatcacagcttatacatctccgccggcaagcagctcccttacaagctggttcaccatggacggatccgcctttcccttcatcgccttcatggtctggcccaccagaaatcccatggccttttccctgccgttcctgtaatcctcaacagactgcggattggcagccatgaccgcctttacggtgtcccgcagggcaccctcatccttcaccaccttaaggccattttcctccacatatgcctcagggtccgcatcgtgcctgaatatctcttcaaacacggttttggcaaccgtcctgttgatgatgttgttttccaccatgcggataagggcagccagatgggagggggagaactccatgtcctccagctccatctcctgttccttcatcaaacgcatggcttccaccataagccagttggatgcctccttgggccggccgctcaagcgggtggtctcctcaaagatgtccgccatgtgcttggaactggtgagaagcctggcatcatactcaggaagcccgtattcctccttgtacctagctattttctccgtgcgcagctccggctggcgggccttaaccctggcaatccactcatcgcttatgaccaccggcaccagatccggatcagggaaatacctgtaatcctgggcatcctccttggatcgcatggccttggagctctccttgttgtcatcccagcgccgcgtctcctggattacctgtctgccttcttccagcagctcaatctgacgcctgcgctccccctctatggctctggcaatggccttaaaggagttcaggttcttcatctcggtcctggtgccaaactcaggggcccccgcctctctcacggacaggttcacgtccgctctcatggatccctcctgaagcttgcagtcagaggcgcccagatactggataatcagcctcagcttctccaggtaggctatgacttcctcggcgctgcgcatatcaggctccgacacaatctcaatcagagggactccgctgcggttgtaatccaccagggaacagtcctcccactcatcatgaatcagcttgcccgcatcctcttccatgtggatttcatggattcccacgcgtttcttaaggccggactccgtctctatgtccacccagccgtcccggcagacaggcaggtacagctgggatatctggtagttctgcggattatccggataaaaatagttctttctgtcaaatttgcagtactggttaatccggcagttggctgccagccccacagccagcgcatactccaccacctgcttatttaacacaggcagggagcccggcatgccggtgcagacagggcaggtatgggtattgggcgctcccccaaaccgggtggaacagccgcagaaaatcttggttttggtggccagctccacatggacctccaggccgataacggtctcatactgtttactcatggctcctcctctctgccctcccggtcaaggcgccggacggctccttggccttcccggcagccaaaagagacagcttccactcccgtgttttctcgtaagcataggcggcccggatgatatttttttccttaaaacagtcgcctatgagctgcagtccaatgggaagtccctttgaatccaggccgcagggaaggctgattccgggaagaccggccaggttcacggaaatggtatagatatcccccagatacatcttaagaggatcccccagggactggcctaaccgcggggctgttgacggcgctgccggcgccagtatgacgtcataggacgcaaatgcacggtcaaattcctttttaatcagtgcctttgtgcggagagccttcagataatatgcgtcatagtagcctgaactcagcacaaaggatcccagcatgatgcgtcgcttcacctccggtccgaatccaagggaccggctctttttgtacatgctgtgaagcccctcgtattccggcgcccggtagccgtactttacaccgtcaaaccgggacaggttggagctggcctccgcagaagcaatgacataataggcaggtatggcatactctgccagcttaaggtcaaaggtctccacaatggcccccttttcccccagcaccctagctgcttccagcacagcgtccttcacctcctggtccagcccctgcccaaagtaggattccggtatgccgatgcgcattcctctgacatcctctgacagggctgaggtgaaatcacaatccctccgctccatggatgtgctgtccttgaggtcatgggaggccaggacctccaaaacagcggcgcagtccgacacgtcctttgccacaggccctatctggtccagggatgaaccataggcaataagcccatatctggacacggtcccgtaggtgggcttgatgcccgtgacgccgcagaaggagctgggctggcgtatggaaccgcctgtatcagaccccagggcataaaagcactccccggcagccaccgccgcgcaggaaccgccggaggatccccccggcacatgttccaggttccacggatttctggtaacaccaaaggcggaggtctccgtggtgcttcccatggcaaattcatccatgttggtctttcccaggataacggctcctgcctgcaccagattggaaactgcctgggccgtgtaggtgggaatgaaatttcccagtatcctggaactgcaggtggtccgcattccctttgtacacatgttgtccttgatggccaccggtactccggccagggggcctttcaaccttcccgcctcaatgtctgcctggaccttcccggcctgttccatggtcttttcttcatttacggttacaaaggcgtggacagatggctccatggcctttatcctagccagagatgcttctgctgcctggaccgcagtgatatcccctgactgaattcttcttcccagctccagggctgtcatatctgatatgctcatgttcccattcctcctatcctacggtcttaggcactttgaatgctccgtccttttgctggggggcattggagagaatctggtccctctggtccgtgcctgtgaccacatcctcccggaacacgttatgcaccggaaatacgtgggacataggctccacgccctgtgtgtccagttcatttaacttatctatataatccagcatccttcccatgtccttctttgcttcctccttttcctccggggaaagttccagctttgccaggatgcctacatactcgattgtctcgtcacttatgatatttgccatgatttcctgctcctctcagttattttcctgtccctatggctccagcctggtcacatcccttgggaacagtgacgcctccctgacattctgttcatccagaagcctcatggtaaggcgttccagtccaatgcccaggccgccgtggggcggcatgccatatttgaaaatcataagataggaagcaatgtcctccggatccatgccccgcttctccatcttggctgtgatttccctgtaatcgtgaatccgctgtccgccggtggtcacctccagcccccgaaacaaaaggtcaaaactcagagtgaatctggggtctgccgggtcgtccatggcatagaagggccgttttttggaagggtaatgtgtgacgaacacaaaatcgcttccgtactcttcctggaaataccgtcctatgagcagctcctcctccggctccaaatcgtaggggttgcgtatcttcctgtcatattttcttgaaacaagttcctttgcctggtcaaaccggaccgctggaatccgtcccacctccggcagggtcacccccagcatatccagctccttcttataatcctgctccagaagtttcatgacatactggagcattcccgtctccatatccatcacgtcccggaagctgtcgatataccccatctcgaaatccaggctggtgtattcgttgagatgccgggtggtattatgtttttcagcccggaacacaggcgctgcctcaaacaccctgtcatatacgcccaccatggtctgtttgtaaaactggggactctgtcccagctctgccttcttattaaaatattccagtttaaatacgttggagccgccttctgctcccctggccacgattttaggagtgcgtatctccgtaaaatctctgcttaaaagataatccctaaatccccttacaatgccttcctgaatcttgaatttggcccgctcccgcacgtttcgcagggagatggggcgcagggaaagctttgcctccagggatgtgttcagcttccatttgctgaccgcaagaggcaggggctctgcaggccgggacagcacccggatttcctttaaccgtatctcaaaaccctggggcgcccgttcctcggcctttacaacacccattacctccacggcgctctcttccttcaactccctgatgtcaaaatccgtaatcccggcctcatatacacactgcaccagcccccgggacttgcgcaggatgacgaaggccacctcgcccatatggcgtgtggtatgaacagccccgttcatccgtatttccttgccctcatattccccttcaagcacttccctgatatccaggaccctcttctccttaactccgttcacaaattccatggcactctctcctcgctatgagcacttgacatctgtcttttagatgtctagtgcgatgcatgtcactggcacttggcaggcgtactttgactgcctagtgcagtgattcgctatgagcacttgacatctgtcttttagatgtctagtacaaactggatttcggttccggttgattttcttttccatggacataagccggctgtctggtccacaaataaaaaaacgccccggaacacagtaactgcattccgggacgggattcaattcagacatttcccgcggtaccacccgcattgagacctggtcccgcagcagactgccctgcgcttccagctcccctctctatgtacgtaacgtgtacaacggatatacctactatcagccgtgtcctggccgcttcgatataccagctccagagtgttcccttagcccagtcctgcccggcagcgctctcagtcggtgacgcccccttcctgtcacatttctcaggccagagtctctttcattgctgttgattatttatttactaaaatagtacatcactgaatcaaagtcaagggcaaatatttttccgggatgaattttagataatttcacaataaacatgtccatgtctgaatatttattgttacaattgaaactgtctgccgtcatcccataaagcggatggaaagcaggtcccggcatgtcatatttttactccgctctgcatagactgcaatatggaaactactatacatataaaggagctcatgatgttatccatccatgattttcattattcctccgatgcaccctatccacccatcaaagcagagtccgggaatccggcctatgcaagggtgatgttggacaacataggcgggagcaattcagaaatgtccgccatatccctctatgtcttcaaccaactgattaccggatacaatcccgatgtcagcgctgtattccacaaggtcagcattgtggaaatgcaccatctggaaatatttggcaagctggcccagcagctgggagaggagccgcggctgtggactcagcacggatgtaagaagatatactggtcccccagctacaaccagtatcccggagatctgcggaccctgatgcgcaatgttatcgacggagaaaaggcagccatcagcaagtaccagcaccagatttcctacatacgggatgaaaatatcaccgaaaacttaaggcgtattatcctggatgaacggctgcatgtggaaatttttgaaaaggtttacggagcgtattgttcctgaccgcccttaagcatggcgtatattggtaaactccgatatctccctgctgaccgtgcataaatcatccgcatccatgtcgtgaatgttgtcatgccctgtaatcctggcaaatgtctttatctcctccagggataccctgaggaaattagccactctctgcgcggccgcgtcctccttgaagcggctgcgcagtttctcgtcctgggttgccactcccacgggacacattccggtgccgcatatgcggtactgctggcaggcggctgccatcaaagctgcagaagcaatggccaccgcgtccgctcccatagccagcgcctttgcaaaatcagaggatacccgcaggccgcccgttatcaccagctgggccccgcagcctgcctggtccaggtatttcctggccctgtaaagggcgtaaatcgtgggtacgctggtggaatccctgataatcttggggctggctccggttgcccctcccctgccgtctatggtaataaagtcaggtccggcatagacgcagaattccaaatccttctcaattcttcccgctgcaatctttatgccgatgggccgtccgccggatacgaggcgcagcctgtccaccagggccttcaaatcctctttggtgtcaatgcccggaaagcgcgacggactgatgacatcctgtcccaagggtttattccttatggccgcgatctccggcgtgaccttgcctccgggcagatggcctcccatgcccggctttgtgccctgcccgatttttatttcaatggcgtctgcttccctcaggttctcgtctgtcacactgtactggtttggaacatattcaaatatatacttgtaggccgccgccttctcctccggcagtatgccgccctcgccggagcacatggctgtgcgggccatggcgcttcccctggacagcgctgtctttgtttccctggaaagtgctccaaaggacatgtgggaaatataaaccggatggtccagcaccatgggcttggccgcatgttttcctataatggtttctgtttttaccggagcatgttcatcaagcggcatggggttcagctgggcccccagaaacaggatgtcatcccagcccggcatgggcatctgggttcccatggctgcaatgatggactgtccctttacagccatctcatgaatttcgtccatatagcgggcatcggtctgtgtcctggcatactcagggtcataggcagcagcctcccctgtactgccgccgcagtcctggcatgcttcccgggttccgtcttttttaacgggcttctccttttctctgtccggagccttggcgccggcccctccatcctctgccttcaccagcttatcggctgtgaccatgcacacgggacagacttttaaatcagatacaggaactccctccttctcctcatcataaattgaaccacagaatctgcaacgatatactgccattatgtttcccccttctctaaatcattgtcaataatagtaattattactgttttaaatatagcacaaacaacccgcaatgtccagcgttttatgcccctatatgtcattgacttaccataataagtaatgttacaatatcttttatgcacaaacgagaaaggaagtcgcactacatgtcacaagaaaacaaaatgggcgttatgcccattaataagctgcttatatccatgtccctgcccatgattatctccatgctggtgcaggccctgtacaacatcgtggacagcgtgtttgtatccatgataaaccaggctgctctgactgcggtgtccatggcatttcccatccagaacctgctgattgcagtatccgccggaacctgtgtgggcgtcaacgccctgctgtcccgttccctgggagaaaaaaattcaaaggcggccaatctggctgctgccaacggcctgtttttggccttcttaagcttcctggcctttgcagtattcggcctgttcggatccaggctgttctttgaaagccagacaaacaacccggtcatcattgaatacggcgtacaatatctccagattgtctgcattttctgcttcgggctttttggggaaatgatgttcgagcggattctccagtccacgggccagaccttttactgtatgattacacagggcactggggccatcatcaatattatactggaccccattcttatcttcggcctgtttggagtgccgaaaatgggaatacagggagctgccgcagccactgtattcggccagattgtggccatgttcctggccctcatcctgaaccactccaaaaacaaggaggtgcggattaatttccgttcgttcacccctaactggagaactatttccattatctaccaggtaggcgttccctcgattatcatgcagtccatcagctctgtcatgacctttgggatgaataaaatcctgattggtttttccgagacagccgtagccgtattcggagtatatttcaagcttcaaagctttatcttcatgcctatattcggactgaacaacggcatgatacctattgtggcctacaactacggggcccgcagtaaaaagcgcatcatggaaacggtctggctgagcatcggcattgcagtgggcatcatgctcatcggactgatggtgttccaccttatgacgccccagctgctcatgctcttccaggcagacgaggagatgctggccatcggcgttcccgccctgcggattatcagcctcagctttctgttcgcaggatactgcatcatcgtgggatccgtgttccaggccctgggcaacggcgtatacagcctgattatatccgtggccagacagcttgtatgtatcctccccctggcctggttttttgcccggacctttggactgcatgcagtgtggctctccctgcctctggctgaaatcacctctgtggtgctcagctccatcctgttccgcaagatttatctggataagataaagcccctgggacaggcggctgcctgacggatgccggctgctgatttatgtttggctcacccatatacgaaacgggctgtccgggaacagattatattcccgaacagcccgtttgccgtcctgatcttactgcctactctgccgcataattcaatctcaccgtaatattggcagtcttataccgggagctggtgtccaggtacccgtcgtagctgtaggattccgacccggaattctttgccgtaatctggaacacgcccaaagtggcgcttaacagctttcccgcctttgcccctgaaccggcagacatgatgtcaatgcgctcctttgcattggcagtggccttctcaatcaggtccagcttcacctcatccagcttggtataataatactccggcagctcagactcaaactccacccctgattcgatcagcttagtgatatccctggagatattctccaccttgtcaatatcataggatgaaaccgtcagactctgggtcaggtcatatccgtccggctcatctcccagatacttgccctcctcatcgtatctggatgtataggtctgggaaatattcacggaactgaatatcatctcgtcatccgccacctggttttcctccagatactgtctcaccagttccgcatccttcttgatgatggcgtaggcatccctgggcgtatcgccgtggacagaaaagctgcctctccacacaatcagatccgactcaaaatcacagctggcagaaccggttgccgtgattccgcttcccccgccgctcttcttataatccaccagtccgcctgtaaagatgctgacgcagataatggcgctgagtgccgcgatgactgcgataatcacagacctgccctgagccatgaagcctgtcttttcttttttctccttgttctcttccaatctctcacaaacctccttttatatacatgttcctgcaaacctgcacgcccggcgcaggatgtggtggttttagtatagcatgtaaaaggaggaagagacctgacggctttcttaatatttacggtcaaaatagcaggaagcagaaaacaggcgctgtatcactcccctatcaggacatccagccgtttcagggcttctatgtatatcaccatggcattggtaaggttttcaatcttcacacactcatccggctggtgaccgccgccgcggcccggagggcagggctttttctgtcctctgatgcccggcccaaaggcgaccgcgttaggcagtttcctggcataggtgccgccgcccatggaataagcctttgtctctgtccccagtacctggcggcacagggcggtcagctcttttaccaccgggctttccggatcaatgacacagggcgggttatcccggctccagtccagaatccatccgtattttccggcttgtgcgctcatctgctttaccagtgcctccgcgccggcagtcaccggataacggatattaaagttctggatgaaccgtcctctctctgtcctggccatgcctcccaccagggtaagactgccggacagcccatcctcaaaggcaatgcccataccttccccgtaataatcagcaaatccctggtccaggaaccggaagcaggcttgttcctcctctgtcaggaagggggctttggccagcatatgggccagcttcaccgccgcgctgtcagaaccctcgggaaaggcggcatgtgctgtttttccggcagcctttataacgatctggctgccgccctctacggtaaaatcctgggggttatcaaggctgtccacataatcccggaccgcatcgcagcctgtccggctcagccatacccgtgcctctgccggaaccgcattggacgccactccggccgaaaaaccggtcacatggccctccggcatggcgcatgaaaattccccttccaggattcccttttccccgtaacacactggaaatgaggcatccggagtaaaggaaaattccggcgcaggataatgggaggtatagtactcaatgtcctccatcccccgctcttcactgcatcccagatacagccgtatggtgtgttccagcgggacttcctgttctttcagatatttcatgctgtagagcgcggcagcggcaggccccttattgtccgcgcttccccgaccgtacagccaaccgtcctttatcacaggtttgtagggctctgtcgtccatccgtttccctcatgcaccacatccagatggacaaaaatgcctatttcctgtcctgtccggcccggcatgagaatacttccgcagcggtaatcatggttttccgtctcaaagcccatttgcttccctatctccaacgctttgtccaataccatggcgcagccctccccgtagggatgctctcttgttcccggttcgctgacactgcgtattttcatgagctccatggcagtatccagcatattttctctctgggacaatacccattcttttacatccatatccttattttcctctattcatagcagttcagacggcacatcatcctgccgtctgaatttctgcttttattcatcatacagatgacaggccacaaaatgcctgtcccccacatcctttaattccggcacctgaacacggcatttttccgttgcataccggcatctggtgtggaacctgcagccctggggcgggttaaaggggctcggcacatccccctccaggtggattttgttgtactcaatatccatatccggaatcgggatagccgagagaagggcctgggtgtagggatgttttgcgtcttcatacagcgccttcttgtctgctatttccatcacatttcccagatacatgaccatgatccggtcacagatataccgcaccacgctcaggtcatgggaaatgaacaggtaggtcaggtccagctccttctgaagatccatcatcaggtttaacacctgggcccggaccgatacgtccagggctgatacaggctcatcgcacaccacgaatcttgggttgagcaccagggccctggcaataacgattctctgccgctggccgccggagaactcatggggatagcggttcatgaattccagcggaagccccaccttatccataatttcaatcaccctggcttccttttcctcctttgaacccatggcaaatacatccagcggggcgcaaatcagctccctgaccgtcatacgcggattcagcgaggaataggggtcctgaaatataatctggagctccctgcgcatctggcgcatctcttctctgccgtattccgccagattctttcccctgtaaaccacctgtccctccgtgggttcatgaaggcgcagtatggtcctgcccagggtggacttgccgcagcccgactcccccaccacgcccagggtttccccgtactccatggaaaagctgactccgtccagggcctttaccgcccgcggttccctgcccctgcgcttcttgccggagaaaaagtatttttttaaatttcttacttccagaattgtctcgttgccgctcataccttttcctccttaagattctcatacttccagcagctcaccttgtgtccgtcatccgtgatatacaccggcggctggtgctccctgcatttgtccatggcctggaggcaccgggcgcagaacctgcatccctttggcatcctgtccagggacggcaccgtaccgtcaatggaaaacaggcggtccaaatccttgtcaaggcgggggatggaggccagaaggccctgtgtataaggatgcatggcctccttgaatatctgtctggcgcttccgtactccatgaccttgcccgcgtacatgaccatgatgtagtcagccatctcagccaccactcccatatcatgggtgataaggataatggaagcattgatgttcttcttcagctccaccatcaggtcgataatctgggcctggatggttacgtccagcgccgttgtgggctcatccgctatcagtagggatggactgcaggacaatgccatggcaatcataaccctctgcctcattccccctgacagctgatgggggaattccttcagcctctgctcaggagaagagacaccaacctttgtaaggatatccagggcctgcttttttatctcgtcctttgaaagactgctgtgtacggaaatggtttcctccagctgccttcctatggtgagcacaggatttaaggatgtcatggagtcctggaatatcatggaaatctccctgcctcttatccggcacatttccttattcccttttttggcaatatcctcgcccttataaaggatttcaccgcctgccacagaacccactgcatggggaagcagctgcaggatggacagggaggtgacgctcttgccgcagccggactcccctacaatacccagggtatcgccctggtttacggaaaagctcacatcgtccacagcagtcacggtccccctcttggtcctgaactgtgtctttaaatgtttaacctctaataatggctgtgccatattctacctcctctgcagggccggcaccgggaatatcccggtgcctttgctgcgtcatgactattctacatgccattcccaaacggaacggttcaaaagactgtaatcctcaaagcatacattggagattttcttgttgtaggcaaccaggtccttctggaaatacagccatacaaacggacactgttccctgagcatcatctggtactcatcatagtatggcttcctgtcctcaaagctgaactggttcaggccctttcttcccacctcgcccagggacggatcctcgttctgggagaagttattcagatggcccggagtcacgttcatcacgctctcgcccgggtcgggtgaaccgccggatccaatcagcgcaaaatcatactcgccctttcttgcggtggacagcagggtcgggtggtctgtggtgatgatttccacgttaatgccaatctttgcaaggtcctgctgaatcatgggcgccgatttctcgcgcacctcattgccctttgacacattgaggcggtaggtcttgctggtatcaaatccggattcctccaccatctgttttgccttgtccacatcatatgggatgggaagaagttcttcattaaagtatctgtggcttggagccagggggcccggagccggtacgccttcgcccttcatcaggttattgaccagggcgtcgcggttaatggccatgtttactgcctggcgcacttcctggggaatgttcttggtattgcaggaaagatactggtaacccagggattccactgcctctgtggtcaggttttcctgctgtcccgccatatcccagtcatttaacgggatgttgccgatgcctgcgccggccacaatatcaatctctccgttcatcagacctgacagaaggttggacgccggcacgattttaacaacaaagcggtcgaattcaggagcgttgatgtggtaatccttattagccgtgaattccacgcgctcgccggatatctcagactcgtaaatgcatggaccggaaccaatgggggctttccagaaatcagctgccagcatgtctttcacaggaatgtcctccagacagtgctttggcaggatgtaaaaatcgcggaacatgatgtccagcatataatccaggttggtggggtccttcagtgtgaactctactgtgttggcgtcaatggccttcacgccgaattcctctccttccacacggattccgtcttccgtaccggcaaagggagccaccttggaacggcgggccacactgatgtcagggttggacatgagttctgcggtgtataccacgtcgtcagccgtcacaggctgtccgtcatgccacttggcgtttttgttcaggttaaatgtaatcttggtatgggtctcatcatccatggaccaggaatctgccagacggggtttaaaggatccgtctgcctttaccacaatcagcttgtcaaaaatcagctccagcacggcgtccgtgttggcattggtggtgttaaagggaatcagggtgtcccacggggccgtcatggccatggtcacgattttctgtccctgggaggcagtgttctcctgggcattgccgtctgcgctgccttccgccttggcgtccccgccttcggctgctgttcctgttgcggcaggggccttggtatcgctgggcgctgaaggcgctgaacagccggacagtcccatcataagacacagggcaagagctgtcatttttgttaaacgttttctcattactatatcctcctttttattcaagccttttcggcattgattttgaacttattttcatgtatctatttgatcaccattttggtgtccagggcgtccctggctccgtctcccaggaaattgatacagagcacggttatcagcagggccaggccgggcggaaaccagagccacggtctctgggaaagcacgctgatggactgggcatcatagaggatgtttccccaggatgcctggggcgcctggacccccattcccaaaaagctaagggctgattccgtaataatggcctgggctgcacggaatgtaaatgaaatgagcaccggggcaaaggtgttgggcagtatgtattttgtcaggatagtgccgtcctttgtgccgatggccctggccgcctccacgtaatcctgttccctggccgacagcacatttccgtagataagccttgcgaacttaggccagcccaggactccgataacaatggtaaccgtggccacagagggccccagtacggataccagcaccagaatcagaaccatggccggaaacgacatgaacacatccgcgcagcgcataatcagtgtctcggcaattcccctgtagtaccctgccagaagtcccaggggcacacccaccgccatactgatgactgcggatatgatacccacacttaaggatacccgccctccgtaaatgaacctggcgaagatatcccgcccgatatcgtctgttcccagccaatgaagggcgctgggcgcagaaccgaacatcacctcgtaatccgatgtatacgggtccagatgcagtatgtagggcagggcaatgaccagtatgatttccagggtcagtacaaaagcgcttaccatggccggtttgtgggcgcaaaaacgctggagcacgtcatgaaaataagaatttgccggaatatcctttaatctttcatcctgtttcatgttctcaccttccttcttcttagtcataacgtatccttggatccagcagtccgtacaccagatctaccagcaggttgcccaataacaccacaatggcaatcaccaccgtgatgcccatgataacaggataatccctggcattgatggactgtaccatcagacttcccagcccgggccatccaaatatctgctccgtcacaaccgcccctcctatcagaaaaggaatctgcatgccgaaccaggataccagcggaatccatgcgtttctcaaagcgtggcgcaccagcaccgacggctcatgaagcccctttgccctggccgtgcggacataatcgtcctggagcacctccagcatagagcccctgcactggcgtatgaggcttcctatctgctgaatggccagaaccacggccggaagcaccaggtggtggaagaacatgggccaggtcctgactccggaggagtcgtacatgccggaggtagggaacagcttcaccttgatgcagaagaaatatatcagcaccagacccgcgaagaaattcggcatggcggacccgataaatgacagtccggaagaaatataatcccagccggagtagggcttataagccgacatgattcccaggggcagggcaatgataatggtcagggccatggcgcttcccgtaagaatcagcgtgggccctatccgctccagaatcatatccagcacctggccgttggtgcggatggacattcccatgtttccctgcaccagctgcaccagccatctgatatactggatgataaccggctggtccagtcccagttccttactcttccttgccatctcctctgcagtggcataagggtcgttaaacaggatttccaacggcgagctgggcgccagggaggccaccacgtacaccagaatggtgatacccaagaaggtagggattgctgtcaacagccgtttcgcaatgtacctataacgttccatctgcatatcctcctcatttcatattttaaaaattccgttgccaaattttttatattggcctattataatattaaaagcgattctctctcccttcgcttatctcaatgcaaaaaggagttatacatggacaaccagtcaccgaaactatccttaaaggacaccgtataccagcagttaatcgagctaatctgccagggaaagctgctgcctgacaccctgttcacggaaaaccatatgatatcctacttcggggtcagcaaatcccctgtcagggaagccttaatccagctatgccatgaaaatgtactgaaaagcattcccagatgcggttatcaggtgactgccatcagcagtaagaatgtccgcgatgtgacggagctgcgtctctacctggaactgtccagcctccccaaggtcatggagaacatcaccacggctgacatcgaagagctgaagcgccagaaccaggtgcgcctggtaaatccggaaaaaaaggatttgtggatagcctggcgcaacaactaccagtttcacatgacggtggtgcgcctggcaggcaacgagcaggtgaacaatgccatggagcaggccatgaccacctaccgccgggcctatgcccagctatacaccctgaaaaaggatgtaattgctgccaataaagccagttaccacgacttcttcgtgtccagcctggaaagacacgacgtattctcggctcatgagtatctgaaaaaagatatcctgtttatggaggatgaactgctggggaccggcatcaccacctgatggatgccggttccggttttacctctgctccagcttttccactgagtccaccacgcaccggatgcggtcataggcgatttccgtgggaagggtgcagtctgagcccacgataaagggccttcccttcatctcctccaatacctcgctggtatgtttaaagatttcttcctctgtcccggtgaccaggactccgtgcctgtccgggaatcctcccagaataatactgtcactgaaaagcccggcgccctttgtcaggctgaaatcatttccgtaaatcccccagttcacaatggccgggtgcagatccttatagcggttaaagtcaatattgctcttgcatatgtgcagcacattgaaatccgtggtctttttgatgtggtcatacaccattttctcatagggggccacaaattcctcaaactcttcatctgtaaagaaattccgctctcctcccagggccgcatagaagatgccctccgcgccggcctccagggaacaatctgaaaattccataagagtctcagccacggtccggaacacctttttcatctcagccggacgttcccggcagaatagggtaagctggtatcccatactggtgtagttgcctgcaaaacctgtctcatggaaggcggaggcaataaggccgtggatggtggacatgatgggatactctccctttgccttgtcggctatcctcttgataatctccatctggtcctggaagatggcatccttcctggaaaatcccctgaacttgctgatgtcacccagccgctcaatttttgtattcccgtcatacaggatattttcattcatgattttcaggatatctgtatccgtggccttcatgaagtccagatgggcctcaatggctttctcaccatgatgcatttcttccggaaaatgaagccagaatcccacaggcgtcctgtccactggttttccttctaatacatttctgatacgttccctctttgtcatggtttccattttgttacttcctttccctttttgatgcatgtatatgtatattattctctctgttgatattatcaataatattatcagtcagggtgtatgtcaagcattttttgtgttatttggctattatcaataaaataattcattaaatttgtacatttattctatatctaatatgttttataatattatcagcacggggtaatttttgaatgtgagaaaggaaatttttatgaatatttatgaccagcgcattgcaaaagcaagaaaccgcatggaggatgccggcatttcactgctggtcatcacgccttcatctgatcttatgtaccttacaggctactcaaaaccagccacggaccgtctgaccgccctgctcctaaccgaacacgactcctatttcctgtgtcctgccgtggaaaaaaactatttaaaagaggtagactgccaggcagcccccattttctgggaagacagcggggacccatttaaaaaaatgtactcggtcctgtccgccgctcccggcatatccaggaaatcctgcataaaagcagctgtggcaggcagaatgcagagcagctgccttatccggctcatggaactgtatcccggcatttcatggaacaatgcagacagcgtcctggttcccctgagaaagagcaagacgccggaagagattaccataatcaggagagcacaggaaatggccgagagggcctttgccagattgctggagaatggcctggaaggaaaaacagagcgccagttgtcagaacagctgatgaaactgcgtctggaggaaggctttgacgcagtaggccccggcctcattgcctgcggtccgggcagcgcctccccccatcccatcctgtcggacaacaaggtacaggcaggagacacggtaatgttcgattttggcgggacctataagggatatcatgcagatatgacgagaacctgcgccgtgggatatgcatcagatgaatttaaagaggtgtattccattgttctggaagcccacttggctgtcctgaaggcagctgccccgggcacggcctgccgtgatatggacctggcaggccgcagtatcatagagcgggctggctatggggcatacttcacccacaggctgggccacggcatagggctggatattcatgagccgccctttgcctcagccagcgaagaaggtgtattggaaaccggaaatgtaatctccaatgagccaggcatctacctgcctggacagtttggcatacgtatagaggatttaatcgtgataacggaaaaaggctgtgaatcccttaataccatgacaaaggaactgatgattgtttagaaggatggccggaaatccgtatgaatggccggaggcaggtacggatgccggggctattgggcattactgccctctcttccacttcttgatttcctccagcctgccttttacaggttcctccgcgccctggtccgtaggatgataatattcccttccggccagggagtccggcaggcactgcatacgggctatcttttcctctgtatcatgggcatacacgtagccgtcgccataatgcagatctttcatgagtccggtaggagcattgcgaatggtaaggggcaccggctcagccagcatgttctgggcgtcagtcctggcggattcataggccatataggcagaattggatttaggcgccatggacaggtaaatcacggtatggctcagatgtacattacactcaggcattcccagaaaatgacatgcctggtaagcagacactgccagcgtcagagcctggctgtccgccattcctatgtcctcgctggcaaagcggaccagcctgcgggcgacatacagcgggtcctcccctgcttccagcatacgcgccagccagtatacggctgcgtccgggtcggaattgcgcatggacttgtggagcgcggatataaggttgtagtgttcttcccctttcttatcatacagaaggctctttttcccgatgcactgcttcagcacatcctctgtgaccgtggtcttatccggactgattaccccgtttgtcactgccatttccagggtattcaaagccgtcctggcatccccgttggcaaacccggcaatcatatcaatcatagggtctgtgatctccacattcagataacccagccctttaggactcttaagcgctgtctttataaggcgggccaggtcattctccgtcaatgcctggagcacaaagaccctgcaccgtgacaggagagcgctgttgatctcaaaggaaggattctccgtggtggccccaatcagaatgatgcttcccttttcaacatatgggagaaacgcgtcctgctgtgccttgttgaagcggtgtatctcgtccacaaataaaagggtcttaattcccatcctccggctgttctcagcctggaccatgacctccttgatttcctttatgccgctggtaacagcactgaaattaatgaactgggcattggtccgctttgctatgattcccgccagggtggttttgcccacaccgggaggcccccagaaaatcatggatggaatcttatcctgctcaatgagctggcgcagcagcttcccctttcccaaaagatgctcctgtcccacaaatccgtccaggtcttccgggcgcagcctgctggccagaggattgtatacttctctgtcatcgaataatgacatctgttccatggctttttatctctcctttcagaaatggatctgtatgattactaagaaaccggatattctcatgttctagtttatcttactgtgattttgccgtatacgggcaaaaagctggaattgtattatcacagacggcaaagcatactatattcttcccctttttcatccacaatttcaaatcctgttttttgatacatattcacagcataatttgctttttgtacggaaagtgacgcctgcttatatcctctgtctttcagaatacggagcatttctttcattaaagctgtacctattcccaatccacggtaatctttatacagggaaactgcaatagacggagtggcattatctatatgtccgtaatcattcataatacgtacccaaacagcgcccacagcctttttattaacctctgcaaccaaaccaatatcgtcttttttcgtcccgaagccggttatatatatctgcaattccggctgactgataatggatttgggcggtgcaggcactccctccggcacaaagacagcctggtacaaaaaatcttgaagcaggctttcttctccctctgatattgttctgattttgtagtccataaccgcctcctgcagttttcaattaacagaggaattcgccctctccataacctggaatttctttcactatttctttttcttgttcattacaatagctattgtaatcgctataacagcacaaataataattaaccaaaaatttggatgcatatctttatctcctctgcaactgctgatatgccgggtaatctgcccaagtcaggcaaacaaataacttgcatataacttgcttttttcattctaatcttagcgcatggaaatgtcaaacagctcatttcgtttcactgcttcacgctactgtccatattctgtctgctgacttgggcaccattatggcactcaatttaccttttccggattggttttcacctaatgattgtgccaatccctgaaggcaaattcctcatccatttcatcatatgcgcattccagcaaatcagatccccatccgtctgaaaactgaaatgccatgaaccgcccctgcaatgataagccttccggaatcatggtcttaaccaacccttcaaagttgaacatgggaaacaattccctaagcctttcttccacatctgttttatccacggttccattattgggtacgcagtcgaattcatcagcccactggaaaacttcggctgtttcttttgagtatacttctttttcccggaactccccgtctccatttttcatacgccccggtataaccgcttgttctatctcccaaaatggatacccgctgcctgttaagtcactgaaaagccgatataatatacaatcattaatttgcttttcattctccctgatttccttttccttttgattgtagtacgcggtaagacctctggctattccgccactgtctgctgtctcagatttaagatagggaaacagcggcttgtaccaaaaggagtcctcagcctgcaattctttcatgatttcctctaacgtatcgttaatcatgatattctcatccccaaaatcctcatttacatagtttcctgctattcctatggaaaagctgcccttaacaagaaagcgtttgtctctatagattatttcaatcatatatgtgttactcctttgtttatgttggtgttttttgggcggatgttttttacggatgagggggggcatgtgcttaacggattccctgttgaccgggatactggtaatatgttcttttaactgatgttttgcgaattctcaatatataattatggctgctttcaatgcattaggctctcgcgagcctcgaccttaaccctgtttccagtatggtgcacattaaacgatttcaatccacaaggctctcgcgagcctcgacccacctaaaactgataaaattagtattacagatatttcaatccacaaggctctcgcgagcctcgactgtacttacaggcattgcagcgccgagtataatatttcaatccacaaggctctcgcgagcctcgacgtatccaacgatttaccacttccaggcgtaccaatttcaatccacaaggctctcgcgagcctcgacattaatgataaagtagcggggtataagcatacgatttcaatccacaaggctctcgcgagcctcgacatcatacggcccggccatcatcccgccatcattatttcaatccacaaggctctcgcgagcctcgacattcgtcccaaaatactatctgcaatagctccggatttcaatccacaaggctctcgcgagcctcgacagcaaaattatccaaacctactccacatcccccctaacattttatgcattatgctcttttctccccagttcaaccaattcagtccattcacccagcccgctttcacggccttttcctctgtttttcaggtgcgaatctccctggcatttcatgtcagcttggcattcgcacctggtttgaagggctcccaactcacagaaaccaactctacttatatattacataatccttcatttcccgcatatatcctgcatgctgcaaagcctctgccgcctccgccggatactctttcaatacaagcctcttttgttccggatatatggctccctgcttgaacgcacggacaaattccgccatcacttccttcatatcttcggcatcgcaaatacgcagtactctgccctgacgttccattacagcagccagctttcccgccttcagggccaccgctgttccggccactgccagaaatccacatttttcaggtagttccagaacttttccccacaccagggccggatctgttccgtttaaccataccgtatggtcatccggctccctcaatgcgccggtcacggcatcataatcctctccgcggacaaattgggctcccgacatcccctctacaaaataacctctgcggatgcggcctgtatattcccagatacgaagaatttccaatgcctgggcccagctccactcccatttttttccatcttctccggtctggacatagggcgagtctgacacagcctgtacagactttataaaagtctcacggcacagaatcatattttcatcaaaaaactgctccagccattcctccggtccatattttcttaccggccttactatatcccaccgcccagctgacagtgccatgaccctggtattcacacgttgtctcacagcagctttctttaccttgtcctgattctgccattgccttacaggcacaaaactgtctgcacataccaggcccttttcagccagacttaacaatacttcctgggcgctgccttcctttggtatttttgtaaggaatttaagaaaactggctcctctgcgctttaactcctggtacatgagaagctcatcgcccttaagccctgctgtctctgccccggcagatgcctcccagtctatatcctcatagctgcaaaaacaaagggttccttccggcgacattctccagaaatagtccccctgggccagcagccggtccagaagactggctccataccgctccacccgcctggcaaagtacacattttcccaaaagcgtacagggcatggctttctgcatcctttttccacggcttcccttaactgttcttctgccgtggaatgtgtcactgccctggctgccatcagcgcggcgtaatgagatgcgggctgcgtggctgtctgactgcgcaggctgcgtatatggccttccctggccctctcatagagcttttcgtgatagtatacgccctggtcctccactgcttttttgcagcggcatagtttatctaaaagcgcctctgtcatctcctcagacagaaaataccgttcccttacatccaccgcagtctgaccgccgcggtaatagagcatgcgccggacaatgtgcattgcggcttcctcatcctgctgctgcaatgccctcatatattcgtcctcatgttctgccgctatccatattcccggctccacataacaggccagtccctgccgggccagggcctccagccagtcagcaggtatatccagctctcctgcctccaaatctccctccatcatgagaagcgaatggagctcctcctcattttccggcatttttctccgtgaccatcccctggacagttcctctggtgtaggcttaagcaatgcttttttcaaatcttcctgcacggtctggcggattttaggcgtcaccggtgaatactcatacatctcttctgcctctgcctgccactggaagggcagagacatgggagaagggacatccagccagatttctctgaccgtaatgaagccggaacggatcctggccagtatctccatcactccgctgatatcccactggtgttccagacattcccgttttgtctcacgaatcagcggatggtccggctggtccatcagggagcttaacatttccgtgctcttaagacgctgcatccaaagcggctggcgcccgttccgtttcatgcccatcatcagggcgcgggcagcattgtagcggaatgtcatgccgaacagaggcgtatcaggcaggattgcttccagcaccggccgtacctggtccgggttgatttggaataaaagtccttccggcaattgctccctgccatatggatacagaaggaagccatcctcctcatccacactccccacatccattcccatggtattgcgtatcatatgacgcaggaccagggacagcggaccatttacccgtcttccaaacagagcatggaccatgacctggtggcttcctgtactgtccttaaaatgctccaccactatggttctgtcatcaggcagtccttctgtggcctgaatctgacgtgttataaatccggacgcatggaccgacgcagactcgtctaatcccagtttctccagagctttttccagctctccctcacggcatgccttctccagctctcctaatatacggccaaaggcaagactggttctaagatctcttccctttgtctcccctttccagaatggaagtctggcgccttcggccggggcctgggtcacgataacagagtccttatcctgacggaccacacgccagccaaaggaccccagcatgaaccggtccccgatcctggattcatagacaaattcctcatccagctctcctaacttcaccccgtcctctgttttggctgcgtacatccctttgtcgggtatggtccctcccgctgccgtggccagcatacggctgtaaacatccccagccacccggccgtgaatccggtcatacaaaatcctcggacgcaccggtatctcccggctgtgttcgtaatctcctgccagcatggcaaggacgtcctccacatccttcctggtcacctggtaaaatggatacgaccgctccagcacatccatcacatcatctatgctgtagctctctcccgaagccatggaaaccaaatgctgggccagtacatccagacacatgcgcggaggattggcccgttccacgcctccacggcgggccacttgtgcggtcatgccgcagtatactgattcgggcgcagccctgggatacatatacatgacgctgacccggcccggattatggccggcccggcccaggcgctgcatggtgctggaaatggtgcgggggcatccgacctgcagaacctgctccacatcccccacgtcaatgcccagttccatggacgacgtggcacataacagtctcagcctcccctctcttaaatcccgttccacctcatccctctgttcctttgacagacttccgtggtggactctggcaaacccgtccccgcccaacagatttacatagtatgccagcttttccacataacgccttccttcggaaaatgcaattacactcttacagcttaagcactggcggtatactgccattcccagctcttcccataccggatccttccgccttcccacagcaggggccgtaccaataacctgtatatccacctgtttatccatggaaggtgcacagataacggccggttccggggacaggtaggcggccgcaagctccaacggctcaatggtggctgacaggccaattctctgaagcctgcggccgcaaagtttatccagcctggccactgacagcatcagatgcgcccccctcttggtgtctatgagggcgtgaagctcgtccaaaataattgcctttgcagtctttaacacctgtcggccggatttggatgtcagcatgagataaagggattccggagtgataatcaggatgtggggcggatgctttaccatcctctggcgctctttctgaggcgtgtccccggtacggatggcggcctgaatctgccctatgaatggattacccggtctgctttccgctttgctttccccgggagcttccgctccgatcccctccaaaggtttgcgtagattttccctgatatcccccgccagcgacttaaggggagacacatatatcacatacagctcctccttaagttcccccctctcagccagtccgcccaactggtctatgaacaccaggaaagctgaaagggtctttcctgtaccggttggagcgcttaccagcacgtgctttccgtcagcaatggcgggccatgcttctctctgtattttggtgggttctccaaatgttttcctaaaccagctttcagtggctggcaggaattgtttaagggtatcctcttgcataagctcctccatgcgggcagttgtgtgtcattcctgtcgtccggattatgttccgtaaaactacaggtatttatattattatatcattgcactgttttgcctgtctatgactgacatggcagaactgcctttctgaaaggtcttttccggtctttcatttgcagcagttccggcgccgcctgtttccttaacccttatcttattgtataatatactcatatcaataacaggctgaatcagagcctgtgggaatgaaaatctgaaaatacagcagaaatctgataaaacaaaggaaaggaacaaacatggacaaacggaaaacaggcatttttcttctcatattcctgcttggactcatagccggattcctgctctccagcgcggtgagaggacatgcagccgcagatacttccggttcccggatatccggcagacaggaaaacatcccccttataaccaccggagaggactcagcactcccggcttccccggaacaagctgccgtcagcatatctgctccccaggccatactgacctccggaccgtcctatcctgagtgggacaaaaacaccacctatacaggcggcgatcaggtggcctgcggcggtaaaatatatatagccaggtggtggaccttaggggagcttccagggcaggccgatgtgtgggaagccgctccgcagacgccccctcccacagattctcaggccgctcccaaagccggcgcctcatccccggtaaaggtggtgggttattaccctgactggaaatcttaccagccccaaaagctgcagatggatgtgctgacccacatcgcctacgcatttgccatacccacaccggacagcagactgctccccctggaaaacccggaaacagcagtccgcctgatagaggatgcccataaaaaccaggtcaaggtcttattagctgtgggcggatggagctataacggtgccgagctggaaccagtcttcgtgagcgccacttcaaccagtgaaaaaaccaggcagctgggtgatgaaatactggccatgtgcaatgagtacgggtttgacggcgtggacatggactgggagcatcccagggtagacgggccctccaaggaccagtaccaggagctgattctttacctggcagacgcgctccatgcccagggaaagcttctgaccagcgctgtcgtcagcggggtcagcgcagacggcaatatttattatgatgccgcggcccatagcgatgccgtgttaaacgcagtggactggattcatgttatggcctatgacggcggtgacggggaacgccattcttcctatgactttgcagtaaacagcgccgcctactggtgcggcacaagaaaaatgccggccggtaaagtggtgctgggtgttcccttctacggacgtcccggctgggccggttacggggatatcctggccgctgacccggatgccgggaataaagaccatgccatggtgagtggaatggatgtctggtataacggcatttccaccattgaaaaaaaggccgcgtacgccaggaataacctgggcggaatcatgatatgggaactgacccaggacacggacgattccggcaaaagccttctgtcagccattagaaggggcatacaatgatccctatgtcctgctgtttatccctgcggattgtaaggacatttttccttcaggcactgttcattccggccgtacaatccgcatactgtctttttgggccgctccatccatatcccgaatttctcccccacaaaatccactgcctccagtatggctgtgtaggaatcccgtttacagcatctgggtccccctgttttggcaatagccccaaggcttctggaggtcatctcattgcaaagcccccactcttttccgcttaagggtgaggcccctgtaatcaggctgacaaaaatacctgtactcacagcagccccgcaggttccccacaaaccgcagatacctcccggcacctgtgcccctctgttcctcatttctcccagggccgcgtccaaatccagttctcccccggcattcttataggcagccagaagcgcggatcccaccagcacatggtgctccggtccatgcatatagatatagggagacaggatgattttcttcatgattgccaccggatccttgctgtctgtatgcctgcatatatcttcaatgacacgcaggcccatctgctcatggcagctgtcgcagataaagtgaccgttcacacatctggcattgctcataaatgttttgtgacagtaggtacattccatttcaatctgactcgggaaatattccagcggcgcaccgcataccaggcatcccgttgtttgttcttccattgccgtatcctcctgttaaccattcatttcttattcttaggccaatctcatttcagtataccataatccctatcccggttaatacttatttttctgtttttatatcggttttcacattcacttcctgccctccgctgttccccctccccgccctcttcctgacggttcttaccgcaaatcgaaaaagagcgcaaaccgcacgggactgctcccgaaactggtttacactctttttctctactctctgctcagggtagcgcctgacctggccgtgttcaccaggcgggcgtaccggccgagaagccccttttctcttggacgcctcactgccttccattccctgcgtctggcttcaagctcctcgtcgctgacctccagatggaggtaatccttatacaaatccacagttatcctgtccccatccttaaccagggcaattggacctccctctgctgcctcagggcacagatatccgatgcttaagccgccgctggcccctgagaaacgcccgtcggtgatgaccgctgtgttgggtattcccttgatgatttccgtaatccggtgcagctccttcattcccggacctccctttggaccttcatagcgtacaataacggcatcaccttcctttatctcctttgcccggaaagcagcataacactcatcctcgccctcaaataccctggccgtgcccttaaaacgccgcacttccatgggaactgccgatgtctttaccagggctccctggggcgccagattgccatagagaacctggattccgtctgccctggatacaggatcgtccatggactttataacttccctgtcgccctgagacgtacgctccagaatctgccccagtgtttccccagtcactgtcagcacatccttattcattacagactccagctctttcatcacagccggtattccgcctgcatagtgcaggtctaccacggtccggtttccgttgggtacaatggagcacagtaccggcgtggcagtggtaatctttgaaaaatcatcccagtccagggaaatccccagctctgccgccagtgccggtagatgaatcagggcattcagggagcctccgatagcggaaagaagggtgatggtattctccagcgcctcccgtgtcataatctggctggggcgaatctgcttctccaccatcttcatcacaacccgacctgattctcttgcgctgaaacggcgcatgctggtgcttgaaggaatcaggcttcctcccggcagcatcatacccagggattcacagagagcgcccatggtattggctgttcccagaaagggacagattccggggcccgtgtaatatttgagcgttccctcaatcagctgccgctctgttatctctccccgcaggaactgctggcgcagttcctttgactcattgggttttatctgggcatagcagggaccggccgtgacaatgactgaaggaaggtcaatccgtgctgctgcgttcagcattcccggcacgattttatcgcaggaacccatgtacactactccgtcaaacactccctcgcccaccaccatggcctcaatggaatccgtgatgatttccctgtggggcagacagtatcgcataccggagtgcccctgggcaataccgtcacacatggctaccgtgttaaactcaatgggctcgccgccggcttccaggattcccttctttacctcctcagccagctgttttaaaggctcatgtcccggacatatctcattccagctgttggcaacggcaatgagcggcttgtggtccagggagtcgatggaaacgcctgccgatgccagatgggccttggatatggctttctgaaacggctccaatttatcaattgcccgcaacatcatttcctcctgctaacattgttttcttcttgttataacgattcatgaacacccatacggctgccataaccgcaatcagtaccggcacaaaaatgtacggcttcttgatgaatgcctcgtacaccagaaagcttaccgtaaggctggtggcagcgaaggatgtaatcattccttcccccaggtccagtcccacggaggtggccagctgggtcaggacaggcgctgtagccgtacctgccagcaggatggcccctgtacacaccaggcccatgatgatgttcttaaacaggtttcctctggtgatagcaaccaccagggccacacggaaggtcacaaccgccaggtccgcaaagggaagcacgcggtttcccggaagtacggcagccataaggatggttagcggaatgacaatcagggatgtggtgatgacatcaggatttcccactacaaccgccgcatccaggccgataaggaatttcctgcccttaaacttctcctgggtaaactttttggcagcctctgagattggcataagtccttccataaaaagagaggtcatcttgggaatcaataccatgacagccgccatgtttacgcccaacgccataatatcagccactgaatactttgccagaacaccgataacgcagccaagtaccaggcccatgatggtgggttcaccaaagaatcccagatatttcttggcatccttgatttcaaaatcaatcttgttgattccgggtatcttatccagcagccagttaaggggtgctgcgataatgatggaggaaagagctgacatggttggaagggatacgccgggaataccgaagtaatcctccaccagaggcgcggtccagtctgacagcttaaatgtgataatggccatgatgaccgttgcaccgatacccattgccacatttttagtcacaaaataaaccatgattcctacgattgccatgtgatgataattccagatatccacatccagggtatctgtggccttcagtaccagcataacaatgttggtggccagaatacagaatataaggatagcgataatcggcgatgaccatgtaactgccgcgatggctccccagcccacatccagaatgtccagcttaataccgaaattctgcaccatggcctgggcggcaggccccagattgctcttcatcatgttgatgaccagattaatacccgcaaagccaatgccgatggtaaggccgcttctgaaagcctttgataatttcacccggaaaataagccctatgatggttatgatgattggaagcatgaccacagcgcctgcatccagaatcgtattgaaaatattataaagtatctgcatatgattaatctcccctaagatttcatttgtctttcatagcctacggctgtctgtcctgagcgcgtttgagacacactcaaacccctttttatttcagatgggacagaatctcatccagcgttgcatcctcattaattcctgtcagcagggaaatggcgcctaccaccgggatattcacattgccgcccgtaaactttcctgtggtaaccagcaaatcaaaatcatccgccttggattccacctccagaagcttgcactgggttacagataccgggattccgttgtcttcacatttctccctgattttggttgccactaccgttgatgttgcgattccatttccacatgccactaatatacgtttcatttttattttctcctttgatagtctcttttagttttcatcttccagcagatactgcttgatgattttatggatggtgtcaggctgtcctgcctccactatgtgtttcatatcctcctggttctgaatcagctttacgattcgctgaagcatctcaatatgtccgtgggcctctgtcagggccagcatgatgaccaggcttaccggtacgtcattgtcaggctcatccatggccctgaagggagccggtgtcttaagcaccgccacgcagatggcagcctcattgacatggcagatatccgcatgaggaatggccacgttgattcccccggtcttaagacccgtggggaaggactgctcccgctccaggatggcctgtttatatgtatcctttacaatgcccttttcacagagataatctgtcatggcagacagaacctcccggtccgtcataggtttgtcaaattccagaatcaatgattcattaaacgcaatgccgctcatgattctttttcctccatactcttcattttctcttccatggctgctatggaaccgcggattccctcttcattttcattcagtatatcctctttcaggaaaatacccgaaccgattcccgcaaatgatgcccctgccgcaaagtactcctgtacatttgaggtgccaatgccccccacgaccatcagcggcattttccccagaggcgcctggatatctgacacatatctgctccccagcctgccggcagggaatatcttcacaatatccgccccgtccagaaaactctgtctgatttccgaaggtgaaaaagcccccggtacagacaccacgccgcgctcccggcacaggtccaatatgcgcttttcaaataccgtgggagacaacaaaaaggctgcacctgcctcaatggcctccacggcttcttcataagtaaggaccgtgccggctcccaccatgatttgtgctccaaattcctggctgattttccgtatggattccagggctcccggagtattcatggtaatttcaacggagcctaagcaggtccccaccaggttcttgacaaccgtgcgggtctgtgaataggtatagcctcttaagattactgtcactttcggaaatttttctatattcatcattctcgctcctttctgacaatatataaagcaagaatgatgccaactaattgactgattttgtatttttacataaaagattacggatctcttcccgtgtccggctggcgcggatggcagaaaccatggattcatcagaaataatctgatacagctgttcaaaatattttctggaatcctcctgaatggccagcacaaaaataacatccacggtgttgactccatcccataaaacgggtttgtctaattttgtaacagaaatgactggttttgtaaccaatccagggtcgccatgaggaatggcgatcccctggctgagccgggtagtcatcattccctcccgcttatagacgctgagaaggaattcctgccggaccaatccttcctctgccatatgtcccactgcctcatctataatctggtccttaaactccgcctctgtccttatatagatatggcccagagagataacctccgacagctggttttcttcgaacatggcactccgctttaatatgccgcgaagctgcctgatgccctccgggctgtaaacccggcttacagatataaacggataagtgcctgaatccggattgatggtgcccacaatagccagtatctcatactccttttccgtattggcaatgatgcgatcaatgctggaatcctcaatgtaccccctggtcactacaacggtcccggccaggttgctcttcaggcgttccgtcaaatgttcctttaattttacggcagctccctgtcctgtgatgcacaggcacaaaatcgcttttttcctggactcgctctgttcccaggttccggtaagtttaatcttgtccagttcatccgcaatctcgttcagggattcatccgtccacatggtctttcgcactgcttccaccaccatcatggtgtctgtacggggcagcactctgacctgcatgcctgtctcctcccgaattttctgtcccacattcaggagtgagcccatgtcagccagcacgatgcagccttttccctggttgacgcgcctggccatatccactgtcttttccgccatctgagccggcgtatcccacaggttcatatccactccaacagcgtgttccgttcccatgatggcattggcaacctgggccattccgctggccaccgggccatgggataccaccagcaccccaattctcccctcctgggccatgtcctttttcctgaatttcctgaagtacatggccaggaatgccttttcctcttccggcagggtcagataatactttttctgtatttcatccacagcatagcaggcagcttcataatcctcgtaagactgctggcgaatattctccatgcctgggtacaccatacgcccgtgactgcgcatccgctccatggccatgttcagatgaatggccagaggaaacaccacctgttcctccagcccgggaagccgtttcctggccagatcacagatatccctcgtcatgcgcagaatgtcgtcccccacaatagaggcaatctcgtcctcccgtatacccgacttctggaattcatggatatggcgctggaaccttgactctatctcgtcggtgagctggacttcgatgtcctgttccctaaggccgtccctcagcagctggtcatacttttcctccagggattcatatatgttaaagccctccaaaaaggtttccgttcctgattttcctgctgattccccggtatcatcgggaaacacataacagtcgtcagggcacagttcctttatatctttggtaatccggtcaggcacataacccttcctcaggttctccgtcaggctggcgaatgatacggtgatacgtccgtcctttctggcccgtccttccagaaacgctttggcacagcacacctgtatatccgatttaagctgtcccacattgcccgggcagtccccgcccaacagacaccatagcgcctgctgccttatttttatctgtttccccagacgtctggattcccactggaaaaaccgcaggataaactgcagcttctctcccgccggccggtcctttaaggagggaatttctatcaccatgggaatcctgcgcctgaaggtcagaagcagggagctctggggattttccgtggttgcggcaatgaccatcacatggctttcccgctgggtatccacttcccccagacgtctgaacctccccttatccatcagataaaaaaggatctcctggccctccgggggcagcctgtgcacctcatccaggaacagaattcccccattgcacagctccactaccccctttttgttgtcagaagcgccggtgaatgcccccttgctgtatccgaagagctgggccagcagaagctgcggattatccgcataatccgcacagttaaactcaaagtagggagcgtccttaccaaaattttcagtaccgcaggcatactcatgcatgagctccgccagaaagcttttccccacgccagaaggtccgtatataaggcagtgcagccctctgggcggatacagcacggcagcctgggcacgggtaatctgagtcttcatgctaccgtcaaaccctacaaaagcgctgaacgcattagccctttcatcctccgccccggattccgcaggttcttcatattccgcatgtttcgcatattccgtatgttttgcatattccgtatgtttcgctaaatccggtgccagaccggctccctccttctcctggcagtcgccaaaaggagtccatatctccaacagttcctcccgcagcctgcctgcggcatattttcctatcctgtagccggcttcctccagcatcctggtaagcccgcggtccgacacgtccggatgttctgtcagaatccgcttcatgtcctcaaatatgaccggcttcctccgcttcctggaatcaggtatatggtgctcccggcgcaccgtggtcacatcctccctgaatacctgcagtcgggatgctatctcctcatctgtcaggggattcttactgtcctcaccttttatgatttgcaatatccgttcttccatgcgcgcattctcccatacaatcatacagcctgtttcaatgagtattatcataccatcttttgatatgatttaccacatggcaatccagccagcttcccctattggcagttgcttacaaggcgctgcgccagacattcttccagaaactccatacagtactgttccagatgcatcagcccttccttttctatgggaaaatggcccgccccctttaacagcttcatatccttgctgcaattcagtctgtcatagaatattctgctgagactggcatctgtccatctgtcattttccgggtgcaccagaagcacgggacacctgctaaagcgctccggctccgggtggatatgaggatttaaaagcgtgtgcagaaatgccaccggcacctttgccccggaagaacgcctgtctctcatcagcacctcagccagttcctcatggtttacgattgccttcatattccccacccactttacgggcacttttataaagcccagccatgcggatgcctttgatatgagcctgaggccgtgttctgccatccacccggaactcacaacgcttttccggaccaacggctctctctggtccagaaggcaggttgctatcactccctgaatctcaggcagtccggatgcagtctgatatgccaggattccccctgcgctgaggccgaacagaaaggtgggccttatctccctggcctgatagtacatgactatctcggccgcgcagtccacccaatcctggtataccacctttccgtaatactcggtcattccatagaggggaaggtccggacagattacctcgtaaccctgcttcatgaggggtactgctatcaaagacagaagccttccgtttcctcccacaccgtgaaacagtataacccgcgcttttggttcctttaccctgtagtggtctatatgtatgccaaacctgcctattcccacaaaatactcatccggccgccaaaccccggtcagccggttttcttccggcaggtattcctgtactttcttccagtatccgtcttttccgtaatacatgtgtgtccctccgctttgcgtcattactgtttttaagccatgagccggataaaatgaacggtacggcaacgcaaaaagacatagcccgcattcttatgaaagatgcaggttatgccttgaatctgccggtgcataatcctatattgttataatcacaatcctggcttccgtcgctgtcagcgtcgtccatccttattccaagctcctcttgccaatcactaaaatagttgtctttacatagttatgttaaagttatattgaaatcattgtgtgaatgcagatacctctgtattatgcagcattatacgggatgggcggcgggttgtcaacggtatacacggaatcttagcggatttttaatatacggaaatttaacagattcttgcccccacccccaaacagaaccgttctgctccaaggctcaatcccttcccatcctgtcctcatataccttccggtaatcctccaccatgcgttcgtattccttccgttcaaactgccacaagggagagcatatccaggtgatattctcctccctctgcatatagggcttcgtatagtttcgcctcctgcgaatcagttcttcatcccaatgttccgacacccatttcctgtattcaggactgtcaaattgctcacatgctatgttgtccccatattcctcccagtcctggtccgaatatgcttccaggcacaggataccagactgcttctccatccggaaatcctggttttccaaattcagcacccccagactgtcccagtatacagtacccggttccttcctgattttcgccattatgacaatgcagctcaaatcgcagtcatcctcgcacacaagtacaggcacattcaagtcctccgccgaatccaccatctcccagataaaacggttctcagccttccacaccagctcacctgtccatgcgggcagcagtccttccagggagccgaatacttccagcctgggacatgcccctgcacttaccgcctcattcagatatctgacaatgggtctgccgtcaatcatccagtagtattccccgtaatcatatatggtttgtaccagctccatgtgaatccggttcatgtattttcctcctggcttattccccgctccaaaatgccctgtcctaaaaccactttttcctcttaaagaaccatatttccactgccacaatcagcaggcagagaatgcagatcactgcgtagccatagggaaagcccagctccggcatattgataaaattcatgccgtaccatcccgcgatcagggaaaggggcatgaatacagtagtcacaatggtgaggaatttcatgatttcattctggcgtatgtccacctgggtctggtgcatttcacgcagctgcatggaatactccttcatcatctgcaccgtggaataaaggcgccccgccttatcggaaaacaggccgaacagcaggctgtccctttcattccctctctcggccgcatcctgctgcagggtttcccccatgtcggagagctgttcatagtaaacgctcaatgcagacaaatccttcctggctgccaggattcttacgtcaaattcctctgactccctcttaagcagtccttcctccagacgtgtcaggcggtcctcgtactgctggagaaaaatcacatcctccttcagcagatattccatcacatcaaaaagctgcagggaaggagatgttacatctgtcatctggtaatcctgcatctcatccagaagcccccttacataaccgctgtcatccataaagatcagcttttccccggtaaggcaatagccgaatacctgcttttcctttgacgggtcctccttggaaggaatggcaaaagtgcctgccaccgctgctctaaacacatctgccttgcagaaccgtatatggttcagaccgctgccggaaaatattctccggtaaatatccgggcaggcggtccgaaactcttccatggtaaggatttcaaccggatgggactgcccggcggatacaccggcatccgggtcatccttgctgtgatcattccaatggtatttcatatggtatcccccatgcttttttatgtcattgtaacacggaacagccaggacgtcaaaaggccgggcgcctgtgactggctgcccggccttttattttaaatagtcttaaagtgactggttccctacagataatgaggggtctttggtgtcagcacctcactgccgtcctccgttatcagcaccatatcctcaatattaaatccattgactccccgtatataacagggcacctccatagccaggaccatgcctggttccaaaagccgttctgcggaagcattgatatacggctcctctgccgtggcaggacccaggctgatgctgtggccgcagtggcctcttctgtaacagggatactgctcttttacatattcataggcagtccggaacaattcacagacaggaagccccggccttgcggctgcaatcatccttctctgtccctcatacaggcggtccttcagccggaacagctccggggcggcatccttcataacccatgcccgggaagtatccgtggtataaaaatcaaactccgcattaaccccggcatcatatttgaccacatgggtgctctctatgattccgtcctccgggagcgtgagcctggctcccgaagggcctgtggaaaacatagaccatgagctgggtacacagaaacccgttgcaatgactgactgtctgaaacagtccgccatctctctttctctcacccccggccgcaccatccggctcacctggtaaaagccttcatccgcaatccggcacagggtgcggaacatctgtatctcatcctccgctttcacgcttctggccagtacaaacatggacgatatatccacaaattcggcttccggaaacgtctcctgaagctgccggaaatagggtacattcagatacgcaagctccactcccagcttcttatgggccaggtccatgtcccgtaccattttcttcagcatgtcaaaggaggattccatggattgtttatcgactgttttggcagcccctgtgatttcgtcccaggtctttactcccacccaggtatcatagggacgaaccacaaactccgaagcctcctctcccagtctttccttctgttccctcacccgcttttcaaacgtgagttcctcatagtccatggtggtaagctgggtggcagtcttgtcattcgaggacatgactgccagagcaaaaccaggctgtcttgaaaccgtgtgctggtgtcctgcaaaccctgtcacatagtggaaattttccggcgatgacacgatagcgccatccaggcccctttcccggagcattgacttaatccggcgctcctttggttttatgactaccttctcatatttcatttttctgcgctcctaactgcatgtgctgccccgcacatctgccagttcatggtccggcaaatttaccgtcccatcttcctgtccacggctgcctttaactgtcccaatgccctttcaatggtcgccctcggacacgcaatgttcatgcgcatgtagccgccgccctccggtccgaatccccgtccgtcgtttaaggccagtcctgcctcctgcaccataaatgtctgaagctcatcccctgaaagccccagctcccggcagtccagccacagcagatacgtgctctccggcttaagaaaatgaatttccggtatatttttcttcaggtaatcccatgtatagtcaatattcccctccaggtaatccagaagctgctccagccattccccgccttcccggaatgcggtttccacagccaccagactaaaacaattattgcggtgtacatccatgccgaaccagaatttctcatatctatccttcatctcatgatttgggaagaacagggtagctgcctgaagtcctgccaggttaaatgtcttggtagccgaggtgcaggtgatggtaatatcagcaatttctccggaaacacctgccataacagtatggcggtgtccatacagcatcaggtcggaatgaatctcatcggaaataatgggtatctggtatcggacgcatatgtcccctaccttttccagctcctcccttgtccaggagcgccccaccgggttgtgcggattgcacatgattaaaaggccgggcctgcgctttgcggcttcctcaaaagcctcataatcaatttcataatacccgtcctgctccttaagtgaaacagtcagcggagtcctgccgctgttgacaacggaatcatggaattcagagtagaccggagtaaaatacatcacctcctggcccggctccgtaaactcgcgcacaatggtgcagatagccggaatgacgcccagggcaaacgctgccaggcttttgtcaaagttataaccgttgcggtccttctgccaccggcacacagcttcatagtaggaagcaggccgcgtggtgtagccgaatatcccctgtttgtttctctcctccatggcgtccatgatgggttgggcagttttcaaatccatatctgcaatccacatgggaatcaggccctccctgccgaattttctggcgcattcatcatactttgcagaaaaattacggctgcggtccacgggttcatcaaaattatatttcaaatcgtttatcctcctttttgcggggaaaatactccgctaaaataaccgtagggagccccctcccgggccgcccataccggccggctgcaaggagggaattctcccctttcatcagagcctgttcctgcaggctccggtgctgtattgcgcaaattcattaaacgcagtactaatttttcagtcttgggtccagggcatccctcaggccgtcccccaccagattcagggataaggcaatggttgcaatggtcagccccggaaacagtacgccccatacagagtagcgcatatactcctttgcgtcggaaagcatggagcccagctccggagccggcggctgctggcccaggccaagatagctgagggctgccgtattcagaatctgcgccgccacagccatggtggcctgcactataattgttcccactgcattgggtaatatgtgtcttactatgatgaatacaggggaacagccgtaagccttggcagcctctatgtactccatgtccacaatattaaataccgcggaccggaccaccctggtaaagccgggtacctgggaaataatgagcgccagaatcaggttgcgtataccggctcccagggacgccgctatggcaatagccagaagcagtgttggaatccccataaatacgtccagtatgcgcatcagcaccgtatccacctttcccccgtaataagccacgatggaccccagcagacaggcaatcagacaggccactgccgtggatacaatacccacggtcagggacactctggccccgaagagcacacgggcaaaaatgtcgcggccataatcgtctgttccaaacaaatggtgcagggagggccccagaaatctggcgtcataattctgggtaatggcatccgcctcatagtcgcagataaccgatgcaaaggccgccagaaggaccacggttacgataatgacaaagccaaccatagccagcttgctccttcggaagcgtttccatatctcagccgcacggctctgtttcttcctgtctttcttaactgtatcaggttgcaggttgtcgtttggcacgtctaacacctcctacatatttggctttgattcttgggtcaatgtatgcgtataaaatgtccacaatcagtataatcaccacattgagggctgccagaaacaggatacaggcagttgtctggggaatgtccttggagcggatggacgtgatggtcagggagcccagtcccggtattccgaaaatggattccaccagtacggtgcctcccaacaggtagccgaattcatttccaatgaccgtgataaccggcagcagcgcatttctcagcgcatgcttgtaaataacagtatgttcagacgctccctttgcccgtcctgtccttacatagtcctggcggatggtctccagcatgttggaacgggtcagcctgagtatgctggctgccgtggccatggccagggtcaccacaggcatgataaaatgcttcatggtgaccactcctgtaaaggtggatggcagaaggcccagcttcagcgaaaacagcataacaaacatcattgccagccagaactggggcactgcggcaaaaaacatggccaatatggtactgacaaaatccaggcccgaatattgccgcaccgccgatatgacgccgatgggaacacctatcatcactgccaggcagatagaaagcacacctatgcggaatgtcacgccaaaacgggaaaagatttcatcaaatacaggctgacgggttctgtaggaggttccgaagtccccgtgaagggcatcctccagatagtgcacatacctcaccacaaacgggtcgttcatccccaattcttcattcagcttatcaatctgttcttttgttgccgatgttcccaggatggcagaggcagggtcacccggtgtaaatgacatgataccatatacgatgaacgacacgcccagcaataccggaatcatcagcagcaaccttttcaaaacatatttaatcatagatatgcttcctttcagatatcggtagttcagacatccggcttaaaacgtgccggccttaatcccagtgcatatcccgaagggttgagaaaccggaatcataggatctgtctaccgtgactcccttattgtatgcgcatgtaaccacacggtcataaatggggattatgattgtatcttcatacagcttcttctctataacagagtaaatgtcttttctctgttccgggtcctgacatacggaaccgtcctgaaaagccttgtcaacatccgcctcattaagcctggagaaattatatccgccgatagcgctggacatgaacaccgtactccagaaatccacatcagggtccatagtctgtacgatggtggacatggcaaaattaccggacttcatatcggaaacccatgtattggcctccagctgttccacggaaatattcacgccaatctgttttaactcttcctggtagacaacgccaattttcttatagttctcatagccgaccacgaaggggatttcctctccattatagtcagtctttgccagatactctttcgccttatccagattaaactcaggtgttgtgtatttgccggaatacccagcggtcctctcatcccataacaggctggataccttggcaacgccgtccatacccacttccacgatatgctcccggttggtggcataagccagggccatacggaaattcgggtcgcttaagaagggcgcttccaggttcatgactatgtatccgctacccatggtaggattcaaatccagcaccagatcctggctgtccttaagctcctgcaccgcgattggcgggatggtgtacgtcatgtcaatctcacctgtctgaagagctgtaagcgctgtctccggattagtcagcaccacatagttggcctctctgatctgaggcagggcatcatggtaatcatcaaagcgttccaggacaacctgggagccggaatcccactgtttaaatttatatggtcctgtaccgacaggcatctgcctgatgttgtcgccggcctcatttaccgccttctcattcatgatacagaccgtggaggccactgctgtcaggaacggtacatatggctggtccagaacgatttttaccgtcaggtcatccacggcttccgccttgacgatattctttgtgaaattagacatctcactggattccttggcgcgcatcatggaaaataccacgtcgcccgcagtcagggtctccccattgtggaacttaacgccttccttcaggttgaaggtatactctgtgccgtcctcgctgatgctgtaatccttgcacaatacattttcatatttgccgtcataatagcgcagcagacagtcgaatatattgctgtacaccaccttatccaggtccatgccgctgttatatgggtcaaagcccgcaaagtcggaatagacagcaatcttgatggtatcctttcctccttccgggtttcctgcatccgccgccttctcggttcctgcaccagcgcctccccctgagctgccccctgaacttcctccgcacccagccagggcaccggctgccattgcgcacactaaaagcatgctgattaatttcttcttcatctgtttacctcccttaatttagttaaataatacacatgcaacttggtggttctctgaaacatttttcaaaggaatatcatggcccatacatttttccgttgcccttggacatctcggcgcaaaacggcagcccggagccgggtcaatgggactcacgatttctccctttatgctctgtcttttcctgttccttccctgaagcctgggtaccggtatggaatccaaaagcgcctgggtataaggatggagcggattcttaaatagttccctgctggaagccttttcaatacactggcccagatacatgaccatgatttcattggaaatgtgctttaccacagacaggttatgggtgatgaacatatatgtaaggcctctctgctcctgcaaatccattaacaggttcagtatctgtgcctggatggaaacatccagagccgataccggctcatcgcagacaatgaactttggatttaaggacagggccctggcaatcccaatgcgctggcggcgtccgccgtccagttcgtgtggatacgcattgtacagacgggaggccaggcccaccgtgtccatcagttcagccacccgcttttccacctcagatttcttccggcagatcttgttcaccatcataggctgccctatggtttcgctgactgtcatacgcggattcagggacgcatacgggtcctggaaaataatctgcatatccgtgcgcagattctgcatatccttccttccgcattttaagatgtccttgccgtcaaagaaaatctgccctgaattaggctctgacagtctcagtatggttctgcccagcgtggacttgccgcacccggattcccctaccactcccagggtctgtccctgcatgatctgcatgttcacatcgtccactgcatggagttcaccggaaggagtatggaaatacttttttaaagatttcgtctcaagtaatatttttttatcagacatgccaatttctccttataccttgtcttggtgccttaaaaatatagcggttattatatttgcgccgtagcctgctttgtccccagaggtcccgggcagagcccggcggattcctcagtacagactgcgggagcgggttatgagacaccttccggtccatcctggtacaggtggcaccgaatcatatgggttccctccacacattccggcggctgggcattcttacatatatccatacatttaggacagcggggatggaacttgcacccagggggtaaatccgtggggtccggcatcagtccgtcaataggattgagcctcctgctttccacctccaaatccggtatggagccaaacagtccttccgtataaggatgtctgttctttccttcatatatatcttccgccgtgccgtactcaatgatttctccggcgtacatgattgccaccttgtcgcatatctcagccacaattcccaggtcatgggtaatcaggatgatggacgtgttgattttctccttcagctcctgcatcatatccagaatctgcgcctgaatggtcacatccagggccgtggtaggctcatcggccagcaaaagctcaggcttgcaggccagggccattgctatgaccacacgctgcttcatacccccggaaaactgatgggggtaatcctttttacggctctccgcaatccccaccagcttaagcatttcctcaatccgctcctgcttttcctcaggcgtcagatccatgtgaagctccagggcctcaccaatctggttccccactgtaaggaccggattcaagctggtcatggggtcctgaaaaatcatggatatcttttctcccctgaccttccgcatgtcctcctcggctgcttttaccaaatcctccccgttaaacatgatttctccgccggtaatcctccccgatacctttggcagaaggcgcatgagggaaagggcaagggtggtcttaccggcgccggtctctcccaccagaccaatggtctcccccttgttcagggtgagggatacgtgattgactgccttgacaatgtcctcgtccgtcgtatactccacgctcagatccttaatttccaacagcttctcttccatattccagctccattccgtttttatcttcttaaagctttcatttctgttattgtcttcatttctgttatcatctacattcctgatatgatttaatgaagataatccttaagcatgttcatggactgctcattgattctgtcccacatctcatacaccggaatcttccagtcacactgccgtaccttctccgccagctgagggcttacacagatgaccgatgccttttgggcaatcttcttccacccgctcctcttatcctcgtagtaaacttccacatccagctcaggacacatcctgtgaaccaggttcacaaagccgtccgccgactcttcctttttgcagataaccgctgccacggagcctgactccagggattgcagcgcctccatcacatccggggcaacctccactgtcataccgtaaataataggctggtagcttctggctatgctcctcacctgggcatactggaaatatgtggtgatgattgcgtccaggtgctcaatctggtcccggtgttcctccagataatcccgcagctggtccaaatggacctcctcaacctgtacatccgcttctctggcaatctgcatggcgaaccggtggcctatattcttttcctcatacacaaaaataacgcttttcttcttgctctcttcaatctccttcaggaccttgtccacaatgctccgtacctcgtccacagaaagctgataataaatggcgtttttaatggatgtgaccagttcctcctccagcttttttttgtccatggattctgtctgcacaatggtcccaatatggggcctggtaaccaccagctcctgctgctccagccgcttgtatgcattgcgcaccgtattaatgctgattcccagctcatccgccagtacgcggatgggaggaagcttttctgtccaccgcacctctccggtaaaaatgctccatctgatattcctgaccagctggtccgtgtatgggatttttgagtccttattgattttccacacttcggcgtaatgaatcatagatattccaattgtcctttctttctgttgggcaacatttataatgttttattgtttgtttccattgttaccattgtttctatcatagtgtcaatataacacactttgtatgttttgtaaatatgtacatattttaaaatatattaatcaatttttgtg

SEQ ID NO: 3133 - DNA, 62103 bp, Unknown
  gut microbiota DNA sequence
atgtattttattacaacgaaaagaatgttggaagtgtgcttttcagcacaccccaacattcagtatagaaccctttttctgaggtgagccggagcatgccgcttctgccagggctgccccctgtcccggctgcccctgcccaatttttcattttattatagttgaaagtgtgatatactggataaaatagtaaacaagaagagaaggaggggtccaaatgcttgaaaagattgatttaagtaaaaaagttgacaagaagacttaccgcagggtcatggacgaggcggaagagaagctggggcttttgcagagggagtgtaaggatgcaggcattccggtcattctggtgtttgagggaatgggagccgccggcaagggagtacagattaaccggctcatacaggccctggatcccaggggctttgacgtttatgcctgcgaccgccccacggaggacgagcagatgcggcccttcctgtggcgctattggacaaagacgcctgcaaagggcaggatcgctgtctttgaccgctcctggtaccgcagtgtccaggtggaccgttttgacggtcttacgcgggaggacaagcttggggatgcgtaccaggatattctgtcctttgaaaaacagctgtgtgatgacggtactgtcatcatgaagtttttcctgtatatcgacaaggatgagcagaagaaacgttttaagaagctggaggggtccaaggagacctcctggcgggtgacggaggaggactggaacaggaataaggactttgaccgttatctgaagatgaatgaggagatgctggagaaaacggatacagactatgctccctgggtcatcatagaagcagtggacaaggattatgctgcccttaaaatcgtcagcacggttatggaccgcctggagtatgagttggagcaccgcaggccggaagacgaaaaaacggcgcaaaggcaggaatccaagaccagggagcggtttaaaaacggcgtgctgtccggaatcgacctctcaaagagccttacggaggaggagtataagacccggctgaaaaagcttcagaagcgactggcagagcttcacagcgaactttaccgcctcagaattccggttgtcatcggttttgagggatgggatgccggaggcaagggcggagccatcaaacgtctgaccagcaatctggatcccaggggctacagggtgaatccaacagcggctcccaatgacattgagaaggtccaccactatctgtggcggttctggaacagtgtgccaaaggcaggccatatcgccatctttgaccgcacctggtatggaagggtcatggtggagcggattgaaggattctgttcggaggccgagtggagacgggcctaccaggaaatcaacgagatggaatcccatatggccaatgccggagcagtggttcttaaattctggctccacattgacaaggatgagcaggagcgcagattcagggagcgtcaggccaatcctgccaagcagtggaagattacggatgaggactggcgcaaccgtgagaaatgggaccagtatgaggaagcggtcaacgagatgctcatacgtacttccaccacctacgccccatggattgtggtggagggcaatgacaaacgatatgccagggtaaaggtcctccagactgtggtggatgccctggaaaagaaagtaaaggaagtaaagacagacaaatgagtgagacgaaccatgtaattgtaattggcgcaggggcggccggtatgctggccgccatagctgccgccagggaaggcgctgccgtggagctgtgggagcagaacgaaaagccgggcaaaaagctgtttatcacaggcaaaggccggtgcaatgtgaccaatgcctgcgatatggaggagctgctgggctccgtggtgagcaattccaaattcctgtacagcagtttttacggttttacaaaccaggacatgatggatttgctggaacaggcagggcttcgcctgaaggtggagcggggaaaccgggtatttccccagtccgacaagtcgtcagacgtcatcagcgccctgtccgcccttttaaggcaggcaggagtcagggtgtgcctgaatcagaaggcggagggactggcggtggaggagggcgtgtgcaagggggtacggtgcggcggcaggatacagacagccgaccgtgttatcgtagctaccggaggtctgtcctatcccaccaccggctccaccggggacggtcttaaatgggctgcggacagcggccacagacttacggagctttcaccggccctggttccctttgaggtgaaggagacagagacggtcaaggagctgcagggcctttcccttaaaaatatagaggcagctgtctatgacggaaaaaaggagctgtaccgggagtttggggaaatgctgttcacccatttcggggtcagcggccctgtgctcctaagcgccagctccttctgcgccaaggccataaggaagaggcctctgcgcctggtgattgacctgaagccggccttgtcatgggagcagctggacgagcgcatcctcagggatttttccgacagcaggaacaagcagtttaagaatgccctgaaccacctctatccgtcaaagctgattccggttatcattgaccgcagcagcgtggacccggataagaaggtgaatgagatcaccagggaggaacggcgcggactggcagaggcaaccaaggccctggagtttaccctgaccggcctcagaggctataaggaagctatcataacccagggcggcatatcggtaaaggacgtaaatccatccaccatggagtccaagaagattcagggcctgtattttgcaggggagatactggatttagacgcggtgaccggcggctttaaccttcagattgcctggtctacgggctgggcggccggaaaggctgcgtcgtcatagcgccgggaacagcggaggctgcccgcagggcggaatacatgagtaccatatagttacatgagtttaataaaatcatatgagtacaatcaattcacatgaaaacaggacaggagagaatgcaacacatggagtatttcaatattgccattgatggtccggccggcgccggcaaaagcaccatcgcaaagctggctgccaaaaggctggggtttgtatatgtggatacgggagccatgtaccgttccatggccctgtattttatcaggcagggtatatcgccggaggatgaggaggccatagccggggcctgcggccaggtggaggttaccatccgctatgcggacggagtccagcaggttattttaaacggagaggatgtatcgggactgatccggtcagaggaggtggggcgcatggcttccgccacctctgtgtacaggccggtcagggagaaactggtccagctccagaagcagctggccagggaggcagatgtaatcatggacggccgggatatcggcacctgcgtgctgccggacgcgccggctaagatttatctgactgcttccgtggaaatccgcgccagacgccggttcagggaactggaggaaaagggaacagcctgcgatatcagggagattgagaaggacatagaggagagggattaccgggacatgcaccgggagaactcgcctttaaggcaggcagaggacgctgtgctcctggattcctcccacatgaccatcgaacaggtggtggactccatcatacgcatagccagggagcgggggtatgagggataaccatggacaggaaagttacagttgcaaagagcgccggcttctgttttggcgtggaacgggcagtggaccaggtctatgaacagatagaagccgtgaagaacaaaaaggcatccggccccatctacacctacggtcccattatccacaatgaggaagtggtcagggatttgtcggataagggggtcatggtcctggagacagaggaggagctgagggcccttccaagaaaccagggaacggtcatcatccgctcccacggcgtcagcaggcatgtttatgagatattgaaggagaggaatgtggctgtggtggatgccacctgtccctttgtaaagaaaatccaccgcattgttgcggagcacagcgcggccggggaggcggtggtaatcatcggaagcccggaccatccggaggtggaaggaattaagggatgggggaacgaacatactacggttataatggatggggagggggtagataactaccgtctgcccgagggccgaaagttatgtatcgtgtcccaaacgacatttaattacaacaaatttaaagaattagttgaaaaatttttaaaaaagggttatgatagtagtgttttaaatacgatttgcaatgcaacacaggaaagacaagtggaggcagcaagaattgcttcgcaggtggacgctatgattgtgattggcggcaggcattcttccaacacccagaagctttacgagatatgcctcaaggagtgtaaagacaccttttacattcagacactcggcgatttagatcctgacagtgtatcttctgtgcgcagcgtaggtattacagctggggcatccaccccaagaaaaattattgaggaggttcataccagaatggcagagcagagttttgcagagttattaaaggaagaggaagaatcaaccaaaccaatacgtacaggagagatagtcaccggtcaggtcatcgaagtcagcaaagatgagataatactgagtattgcaggtaataagtccgagggagttatcacccgtgacgaatacagcaacgacagcaacgtggatttgaccacaaaagtacagattggtgaagagatggaggccaaggtcattaagcttaatgacggcgtaggcatggtttccttatcctataagcgtatggcagctgacagaggcaataagcgtctggaagaggcatttgagaaccaggaggttctgacagcaaaggtagcacaggtattagacggcggtttaagcgttgaggttgagggcgcaagggtatttatcccggccagccttgtatctgacagctatgagaaggacctgtccaagtatgcaggacaggatattgattttgttatcacagaattcaatcctaagagaagaagaatcatcggcgacaggaaacagcttctggttgcacagaaggcgaagctgaaagaagaactgttcgcaagaatccagccaggcgataccgttgacggaaccgttaagaacgtaaccgacttcggcgcattcattgatttgggcggtgcagacggacttcttcatatttccgagatgagctggggccgtgttgagaatcctaagaaggtattcaaggcaggggatcaggtaagggtactgattaaggatatccagggagagaaaattgccctgagccttaagttcccggaggctaatccatgggtcaacgcagctgacaagtatgcggttggcaacgtggtatacggccgtgtggcacgtatgactgatttcggcgcgtttgttgagctggagccaggtgtggacgcactgcttcatgtttctcagatttccagggagcatgttgaaaagcctgctgatgttttaagaattggccaggagattgaggcaagagtggtagactttaacgaggctgaccacaagatcagcttaagcatcaaggctatgctggcacctgctgcacaggatgcggatgtggctgacgtggacattgatgccatgtcacagtacacagaagaataagatttgaattcatgaggactggttatgggctttggcccataaccggtttttttgcttaaatgctgtttgtctccagaacggcttgtgaggatgcatggttccgtgctatactggaacaaaaaagaaaagcgctggtctggcaggccggagcgtctatttcatggctgggttcagaagcagggatgcctcgaatattccgttgctgtaatcgaatttcagtatgccgtgataccgttccaccagataacgcacagaggtagtaccggtgcccatgtcctcccgtttggatgaaagaaaacgtccgtccttcatacgtatgagatgggaataggtgttctgtatggacagggcaatcatggattcgccggcctgtccgatgttgatggtgatggagggcgttccctgggtctgcctttggcatgcctccactgcattggagagaaggttgcccaggatagtgcagaagtctatctccggcacaggaaggctctgaggcaggcaaatggaggagtttactgcgataccctgggactgggctgtttgtatgtagtaattgagcagcgcgttggaggaaggattctgacagtactgggtggtgtccagggttgcataggtgcccagatagtcatttatgtattccagggcaaactctgtctccttctgctccaaaagccccttgagcgtgatgagatgatggcggtaatcgtggcgcgcttttttgaattgttccagattatactggagcgtggccatctgggatttctggacactggccagcagccgggtagtccgatactgctccttggccgcatagctttcagacagccgggacagaatcctcagactcacatagtggaccgtgtagatacaggcaaaccagcagacagcaaaaaaaatcatgtcaggatgatgctgaagcatacgtgcgggtgccagtgaacgggatgccaggcggaacatgatgaaaaagagcaccgggatggcggccagatatttccagaccggaagaagccgtgtgtattccactgctttggtcagatatttgtgcaggatgtaataggccacccagaccatgagaaacagaaaaataagattgcttaataatttgtctcctgtgataagggaactgctcttattaagggaagcagaggcattggacaggtccgcgcagtatccggcggtatccgtgaagttcttaaaaaggaaaagggaatagatattcacaggccagtctgtgcgcaccatccatttacagacaagtatgttggtggtcatggtggtgcaggaccacgccagctccagccagggccgggacaggaaagggctgaagcatgtaaggcctaaaaagtatacaaaaaacaggtatcccataagaatacctgtagtttttgacatagagtaccgccattcccttcggaataccgccaaaaagggaacgataatgaatatgatttcggccaaaatcacacttatcagctgtatctgtgcaaagctcatcctatgcctccgtttaacttggagaactggtaatctgcatactgctggtgaatctgcgaccgcatggtcctggtaataggcagatgctctccggttgtcaaaatgaactctgatttctccatagaaaaaaccttgtccatattgatgatgcaattccggtagcagcatatgaactgggagtatataaggagcataccggaaaaatcttcaaaccgcatgtaagtgcggaccgtcttatctggaagatggatttgtatgtagtggtttgaataatcggtgtaaaggatagagtcaatgggaatcttctgcatgatgcggctttcctttacctctatataatgactctgcttcctgcgggatacagacaaaaaatactccatggtctggctgaacttgtcgtagcggataggctttaccatgtaatccagcgcacggacctcatatcccttcagggcaaaatcggtgctgctggtggtgaacacgatggtacaggaatcatcatccctgcggaccctttcagcgattctgataccggaggtctcattccggagaaaaatatctatgaatataaggtcaaagctgcctctttgccagcagcgaaggaagtcggcggcggtattgaagatggtcgtctgctggcaggtatgtgtgtcggagcaataggtggatataaagccggctaactgacgggcctcatctatcgagtcgtcgatgactgcaatgttcacggtgcccttcctttctttatgtatggttacagggtaacaaaaggtttataaattatcctgtaacggtacgttatgaaacaatccatataggttcagtataatatacaacaaattaaattgcaagggcaattggaataagttgtaagcgcggtataggcaggcccctgcctgggtataatccatttgtacttaatttgtatcagcaagaaaggagcaagaacctacatgggaaagtctaagaagaatgaggcatttgatcctcataatctgagtgcgcaggaccagcttaaatttgagattgcccaggaactggggttggacgcaaaggtcatggagggaggatggaggagcctgacagccaaggaaagcggcaagataggaggccttatcacaaagcgcaaacgggaacttaagaaagaggcattgcagcaggaataattttccgatatactgttttatatctgtaatcaggaataatacaaaggagacgggaatgaagataggtatgatttgttttacggcaagaggcactgcaatatgccgccttctgtgccgccggttcagggatacagggacagagtgcacgggatatgtgccgcagcgcttctggaagccggaatgggaggcggagggaatcaagcctcaggacaagtccctttcggaatggaccggatccatgtttggacagaagagggcgctggtgtttatcggggcggccggcattgcagtcagggccattgcgccctttgtccgggataagatgacagatccccctgtggtggcggttgacgaagccgggcatttctgcatccccctgctgtcaggacatgtgggaggtgcaaatgagctggctgaaagaatggcgtgctggcttcagggaataccggtcataaccactgccacggatatcaatggcatctttgcggtggatgtctttgcggcccgaaggggcctttgtataacagacagaaaaaaggccaaagaaatttctgcctggctgctggatggcgggaaggtgggatttttctgcgattcggagtgccgcagggcggagggcgcgtctggagccggaaccacaaaaaacgggagttcaggcagaggagcagagaacgttggggatggtactgagggcatatgcaggcataatatatgtatgaacagcgtgtgcaggcataacatatggatcacattccgaaacagtgaaaggccctcccattctccggacagggaagcggtctttctccgcctggttccaaaggtggcagtggtaggggtgggatgcaggaagggaaccccgccggatatcctggaaggctgtgtcctggaagcgctggaaagaggaggcattgacccggcggcggtaaaggcattatccaccatagacataaaggcaggggaagaggcggtaaccaggctggcccgcaggtacgggtgggagctgcgtacatttacatccagggagctgctggctgtggaaggagagtttcaggaatctgattttgtaagatccgcagtgggtgtgggcaatgtctgcgaaaggtcctgtacagccaggggaggaagacttttaatacataagcaggccggaaaaggggtgacggtggcggcagccatagagccggttgcagggaaattagacattgagaaatgcagttggatatgatatacttttccatagtttaaaagtcagatgttggacagcaggtgagactatgggagattcgtacatctataagaatcagaaaaaattgagatggggatacaccacaggtacttgtgcggcagcggcttccttggcagctgccgttatgttgttgcggggcaggagaatggagcaggtgtccctgacaacgccaaagggagtccggctggacctggaggtggaggaaatggagacgggggagaactgtgtctgctgcggtgtcagaaaggatgcaggtgacgacccggatgtgacggacgggcttatggtgtattcacaggtccggctgccggatgcggacagcggcggcgccggagatgcgagagaggccggagataacacagaggccggagatgacagaaatgcctgtggggattatgtgtatgagaaagacggattgcggctgattttatccggaggagtgggagtgggaagggtaacccagtgcggtttgagctgcgaagtgggaaaagctgccattaacccggtccccaggcagatgatatttgaacaggtggccggtgtgtgccgggaatctggttttaagggagtgctttccattgaaatccgtgtgccggaagccctgaaggtggcggataagacctttaacagccgtttgggaatccagggaggtatatccatactggggaccagcggaatggtggagcccatgagcgagacagccctccttgataccatccggctggaactgagacagaggatccgaaaaggggagaagaaccttctggtgacaccgggaaattacggtgagagctttgtgggcactgtacttggccttggccttgggcaggccgtgaaatgcagcaatttcataggcagtaccattgacatggcggtggaagagggggctgagtccatgctgcttattggccatggaggaaagttaatcaagctggcagccggtattatgaatacccattcctcctgggcagacgggagaatggaaatcctggcagcccacggagctgcctgcggcgcaaaaagagagctggtggaacagattatggaagcagtgaccgtggacgaggggctgcgccttttagagacagaggacggcctgcgtgagcaggtgatgaagcgggtgatggcgcggctggagcagcatgtgaaacggcgggccggcggacgtctgagggcagaggttattgtatttaccaatgagcgcgggatacttggggcaaccaccggcgcagatgatatgttattgtactttacgaacagattaagaaatagatgaaaggcggagcaagatgatacatatagtaggagcaggtccgggggcggttgatttgattacggtccgcggacagaaacttttgtcagaggcagatgtggtcatctatgcgggttccctggtcagccgtgatcttctgggctgggccaggcaggatgcaaggatttatgacagtgcctccatggacctggagcaggttatggaagtgatggaacaggcggaacgggacggtcttacaacggtgcgccttcataccggggatccctgcctctacggtgccatacgggaacagatggacggactggacgccagggggataaaatatgacatatgtcccggggtcagttctttctgcggagccgccgcagcccttggaatggaatataccctgcccggtatcagccagagtgtggtaataaccagaatggccgggagaacaccggtgccggagcgtgaatccatagggaaatttgctgcccacggcagcaccatggtgatattcctgagcgcaggcatgacgggagagctgtcagaggagctggtaaagggcggatatccgggagatacccccgcagccattgtatataaggcgacctggccggatgagaaggtggtccggtgtacggtagccacattagaggagacagcagacagggagggcatccataagaccgcccttattgtggtggggaatactgtggcccagacaggttatgagcgctcaaagctttacgaccccgcctttaccactggatttcgtgcgggccgggaaatcgtcccggggaaactggagccgggaacactctatgtggtgggaatgggacccggagaaaaaaagcagatgacaggacaggcgctggaagtgatgggccggtgccaggtcatagccggttatacggtctatgtggacctggtaaggggattgttcccccagaaggagttcctgaccaccgccatgaccagggaagaggaacggtgccggaaggcgtttgaatgctgcatggagggaaagaatacagccatgatttgcagcggggacgcgggggtctatggaatggcgggccttatactggagctggctcagcagtaccccggcgtcagagtcaggattgtgccgggaattacggctgcctgcgcaggggcagctgttttgggagcaccgctgatgcacgattttgctgtcatcagcttaagcgaccggctcacacccctggaagacatatggaaccgggtagaggcagcggcccaggctgattttgtcatatgcctgtacaatccggccagcaagggacggcctgattttttccggcaggcgtgcagccggattctaaagtacagggcagaggataccgtatgcgggctggctgtgaacattggcagggaaggggaagaaatggaggtcctgaccctggaggagctgaaggatcgccgggtggacatgtttaccacggtttatatcggcaattcccataccaggcagattggcccctatatggtaacgcccagaggttacaggtatgaaggaaattaagaagagtgtcatactgtttgccgggaccacggagggaaggctgctggcggaatatcttcaggagcttgaccagccctttgtaatctgcgtggctaccggatatggaagggatttgctggaggatataagcaggccggacgagaacggatgtatggagatacgccaggggcgcctggatgtcacggaaatggaacgtatgtttgatgaactgcggccggaactggtcattgacgccacccatccatatgcggtggcagtaacccagaacataaaaatggcctgttccaaacgaaagggcctgcggcttttaaggtgcctgcgtgaaccgggggccggggacaaccggccgggagtcatccatatgccggatgtggaggcagccgctgcatggctgtcctctgtggagggaaatattctggtgaccacaggcagcaaggagctggctatctacacaaggataagggattatgatcagagagtgtatgccaggatcctgccctcggcggaggccgtggcccagtgcaggagtctgggctttgagggccgccatatcattgccatgcagggaccattttcagaggaaatgaatctggtacagctcagggaatacggatgtgcgtatctggtgaccaaggatgggggcgcagcaggaggcttttcagaaaagataaaggcagcccacagggccggggcagcggcagtggtgattgaccggccgggcagcggggaaggcatatccctggatgatataaagggacagctaaaggagtggatggaccatgaaaagaaaggaagcatatatggatgatttaaggccaattgtatatctggtgggcataggaatggggggcgaggaccagttgacgggccgggcaatggattgcctggaggcggcccaggtagtgatgggggcggaccggatgctggacagcgtcagcgcgtacaccgataagaaacgggtattttcagcctataagcccagtgagatggtacagtggctgggcagcttccggtgggacgaggcagccctggtgctgtcaggagatacgggcttttacagcggagctgaggcggcggccaaggcatttttgcgggaaggatgggatgtggaatttgttccgggtgtatccagcctgtcctatttctgcgccaggttgggaaagagctggcagaatgtccatccggtcagcagccatggaagggattgtgatgtggtggcctatatccgcagcttcaagagctgttttattctgctgggcggagccggtagcgtgccggatttgtgccgtcagctggtcagcagcggaatgagcagcgtgactttatgggcaggagaaaatttttcatacgaggacgaacgcattgcctggcagatgacgcctgctgagcttctgatggaggatgagcgccttccctttggcagtctggcttgtgttttggtggagaatacagaggcagcggaaggacagctttatccgcagcccggcccccaggatgaggactatatcagggggcaggtgcctatgaccaaaaaggaggtacggaggatatcactggataagctgtgtatcggctcccaggccgtgtgttatgatatcggggccggcaccggctctgtggcggtggagatgggaatggagatacgcaagtggggcggcagcggccaggtgtatgccattgagcggaaccgggaagccctgcagctgattgaatccaactgccagaagttccacggaagctggatgggatttcacattgtggaaggcgaggcgcctgaggctatgaaggggctggaacctcccactcatgcattcattggaggaagcggaggtcacatgcgtgaaatcgtggcagctctccttgacgccaatccccatgtgagaattgtggctaatgccattacactggagactgttggtgaaattttggcgtgtatgaaggaattcggattcgccacaggagagataacccaggtatgggcagctcctgtggatacagtgggaagctaccatatgccaaaagcgcagaatccggtgtatgtggcggttatgcaggacccaaaagacgatgagggagagatacaatggcaggagttatgatagcggctccgggaagcggcagcgggaagacgatggtaacctgcggcctgctgaccctccttaagaggaagggatataatccggctgcgtttaagtgcggaccggactacattgacggcctgttccaccgcagggttctgggagtggaaaatggaaacctggacagcttttttgagaccgggacacatatgagacagaagctgtcccggggcatggaacgccattttgtagtggcggaaggggtcatgggatattttgacggccttgggggcgtgtctgttcaggggagttcttttgagattggaagtattcttggtctgcctgccattctggtggtggatggaagaggagccagcttatcgctgatggcattgattcagggatttttggagtatgatgccatgctggagggaaaagacgaggaaaaaactcacaataaaactgactgtgatgctgaatgtgcggctggcatgcaatacgaaggatgcaggaagagaagatggaaagagaatgaggaaaattatcgtgagaaaaaatctcatacatccaacggactgcatgggtgtgtttgcggaaacacagactgccatgagagcaagggtaaaaaaaataacaacataaggggaatctttttcaaccgcatgtcccccatgatatataaccgtataaaacctatggtggaggaattgtttcggattccggtcattggatatttacctgaactgaacttccttcatgtgggaagccgtcatctgggactggtgcttccggatgagatagatggaatcagggagcagctggaacagctggcagaccggatggatgaaaatttggagtgggaaccgctattgaagattgctgctgaggcaggcggacgggacagggaggtaccggtccgggaagaagcaggagccgggcagcaaacggggaatgtagcgggaattaagacgggaaacaagctgggaaacgagccgggaaacataccgcatttccgcctggggattgccagggatgaggcattctgtttttattatgaggacaacctgagggctatggaacaggctggggcccggcttgtgtattttagtctgctccatcaggagaaactgccggatgggctggacgggctgattttaggaggcggttatcctgaaaatcacggggaggccctggcggcgaacaggaccatgcgggattcggtggctgcggctgccgcgtccgggatgcccattctggcagagtgcgggggatacctctatctgctggacagtctggagggagccgacggaacggtttatcccatggcaggggtcttgaagggccacggatacagggccgggaaaaccggcaggtttggatacataaccctggggcccaaccgctgccttccctatctccgggaaggggaggagataaaaggccatgaatttcattactgggactgcgattgcggggaggatgaattttgtatgacggctgccaagccaaagggcggccgcagctggccctgtatgagaacagcaaaacaggtgatggcaggattcccccacctctattatccttcctgccccggactggtccgacggtttgccggacagtgcgtggaatacggacagagacatgaccggaaacatgacagacaagagcgtaacggacaagaacatgacggagaggaacatgagctatgacattgaaggaagcgatgaacagcattaagccagccagccaggcactcaggcagcaggcaaagcagcgctgggaccaggtggccaaacctctgggaagcctgggagtcctggaggaggatatcatacgcattgccgctgcttccggcagcctggcagtcagcctgcgtcccagggctattgtggtcatgtgtggggataatggcgttgtaaaggaaggggtgacccagacagggcaggaggttaccgccattgtggcggggaatatggcccggggaaattcgtgtgtatgcctcatggcccgccaggcaggggccgacgtgattcctgtggatgtgggtatggcctgccgcgacgcggttcccggcgtggtgaaccggaaagtggcatatgggacaaaggatttcctggaggaacctgccatgaccatggaggagacagtgagggccatggaggcaggtgcagatatggccatggaactgaaggaaaggggatatgtgctggctggctccggggaaatgggaatcggcaataccactaccagcagcgccctgctttccgtgcttcttaatatggacccggaactggtgacgggccggggggctggtctgaccactgccggctacaaccgcaaggtgcaggtcataagggaaggcatccgtatccgcaagccgtccggggaggacccggtggacgcgctgtccaaagtgggcggactggatttggcggccctgacgggcttttacattggatgcgcggcctgcggcctgccggtggtgctggacggactcataacaggggcagccgctctggcggccgtcagaatcagcccggatgtaaaaggatatctgctggcctcccacgtttcagccgagcctgccggggcaatggttctggatgctcttggccttaaacctgctatttctgcgggaatgtgtctgggggagggcaccggcgcagcggccctgtttccgcttttggatatggcggcggctgtgtacacgcagatgagcagctttgatgacatccatgtggatgcgtatgagcatcttctgtaattggaatgtaaggaatttggatgaacatgacgacacgataataggagacctggaatgattactctggtgacaggcggaagcggcagcggaaaatcagaatacgcggaagggcttattctggactccccctgttcccgccgtttttatgtggctaccatgattgcatatggaaaagagggacgggataaggtggagcgccaccgtgtgctccgaaagggaaagggattcatcaccatagaaaagccccggaatgtgggagaagtgatggttggagagtatgagaccggtttaagccccttatcccggaccggccgtgctcttttgctggagtgcgtatccaacctggcggccaatgagatgtttaaggaggggacagggaaaacggaagcaggagagcatcagggcggtccaatccaatgtctgtcccataagattgcggaggatatcatttccctggccggacaggttcaggatatggtgattgtcaccaatgaagtggatcgggatggaatctgttacgaacctgagacaatggagtatatccgtctcatgggctgcctgaatcagaagctggcatctgccgcggaccgggtggtggaggtggtttacggcattcccgtgcccttaaagccctccgccctgggaccggcagcaattggggctgactttaaaagaagggagtgtcagggagaatgaacggactttattcctgcatcatagcaatttccatgtattccaagatacctatgcccaacgtggagtggagtgaagaccgcatgcgctatgtcatgtgcttttttcctctggtggggattgtccagggagcggccctgggcctttggctccattttgccctggatgtgctgaatctgtccgtgggtgctgcggctcttacaggggcagccattcccctgctggtaaccggaggaattcacatggacggttttctggataccatggatgccattcattcctatggcgacagaagcagaaagctggaaattttaaaagacccccatctgggagcctttgcagtcatttccttcggcgtttatatgatgctttatctgggcgttttccatgaatacctgtcccttgtcctgagggaggacaggggggacagatattttctttatgcggttccctgtcttgtgtttgtgatggagcgggccttcagcggcctctccgtggtcacgtttccccaggccaagaagaagggactggcagccggatttggcggggcagccaggaaaaggacggattccctggtgctgcttctgtggatgcttatttgcctggcagcaggtgtggcagccgctaaggtgggatgccacggggcaggcatgctggcaggagtcctgcttatgacccatctggctgtgttcatatggtattacaggatgtccgtgaaacagtttggcggggtgacaggagatttagccggatgctttttgcaggtttgcgaactggccggcctggcagcggccgcagtccttttaaaagcgggcttgatgggaggaatgtaggaatgatcttggtgacaggaggaagcttccagggcaagagggtgtttgtcagacagtacctgggggaacagaatgcagatggagctgtctggacagagggagcagaggcctcctgggaggaatttatggacggcaggttctgccgtgatttccagctctttgtcaggcgggtaatggaggggagtgcaggcccttccttccgtgaacagaagggaccggccatggaccagattcttgaacagcttctggaggagctgctggccggaccaaaggaccgtgttttggtgacagatgagataggctgcggcatcgtgcctgcagatgcctttgaacgcctgtaccgggaggagacagggcggctctgctgccggattgccggggaggcggatgaagtgtggcgggtgtgctgcgggacagggatacggattaaataacgaggaaggtagacatggacattacgtggctggatatatggaaatttcacggtgcggcattgttggcgggatgtgtgattgactggatcataggagaccccatatggcttccccatccggtgcgccttatgggaaccatgattgcagggacggaatcacggctcagaaaatggacagaggggacgggaaggaaagggcagtcccgggcaggggtcatcctcgctgtattcatgtgtatcatatggtggtgtgttccatgggcaatcgttcacggggcagagcatctatggctgtccggggcctgggcggttcttcttctggcagaggggttcctgtgcagtctcatgctggcagccaggggactgtatacagaaagcatgaaggtgtgccgcagcctggaggaaggcagcaccgaggaggccagatataatgtatccatgattgtgggaagggataccgcagcgctggatgagggcggaatcgccagggcagccgtggagaccgtggctgaaaatgcctctgacggtgtcattgccccctttttgttcatggcacttctagggccggcaggaggcacgctgtacaaggccgtcaacaccatggattccatggtgggatacaaaaatgacagatacatgtacttcggccgctgtgcagccaggctggacgacctgcttaatctggcgccggccaggctgaccggaatccttatggttctgggggcatgggttctgccgggcatggacggggctcatgcctttaaggtgttccttcgggacaggaaacgccatgccagccctaattccgcccacggcgaggccgcctgtgcaggcgcccttcatctccgcctggccggtgacgcctggtacttcggaactcttcataaaaagccgtatatcggggatgatgacaggcaaatccaaccggcggacataaggcgtgccaaccgtcttatgttttttgcggaggggatgatggtccttgggctggctgtgcttattatgattttgtgataccattctggttttgccaaaacagccggcgggggtagaaaaggatagctgtaaaaaagatatatggaggttattatggaatatcaacacggcggtgacatatacagccaggacatacagatggattattctgccaatatcaatcccctcggcatgccggaggcggtcaggcaggctctgagggactgcctggagagggaggtatgcagcctgtacccggacagccggtgtgaaaggctgagacaggccctgggcaggcatcacggggtggaggataaatggattatctgcggcaacggggcagctgatttgatattcggactggcagctgcgctgcgccctgtacgcgggctggtgacagctcccgccttttccgagtatgagcaggcattgaggtcggtgggatgcaggaccgactattattatctcagggaagacagggggtttgctctggacgcggcagggatgtgcggctgtgtccgggcggcggcagagaggggcgagccctacgatgtggtgttcctctgcaatcccaacaatcccacggggatacccgttaaaaaggaagaggttaagcagctggcagatacttgtgagcggctgggggcttacctggcagtggatgaatgcttctgcgattttctggataattcagaattatattctgtcatacctgacctggcccggtttacgcatctgtttgtccttaaggcatttacaaagctgtatgccatggccgggctgcggctgggctacggcctttgcagcgacagcggccttctggagcggcttcaggcagtacgccagccctggtccgtgtccggcccggcccagtgcgccggcgtggcggcccttggagagacggattttgcggagcacaccagagcggtgcttaagggtgagcgggagaggctttctgccgccctccatgacctgggctttcaggtatatccatcccaggccaattatctgttctttcgggaccgggaagaggacggaatcctggaaaaaggccggctttaccaggagctgctgggccggcgcatcctgatccgcagctgtgccaattatccggggctggactcatccttttaccgtatctgtgttaagctgaggcaggacaatgaacagctcatccgggaaatggcccgggtgcttgagaggaggaaaccatgtcccaacatacaaagtcaatcatgattcagggaaccatgtccaatgcgggaaagagcatcctggcagccgggctgtgccgtatttttcaccaggacggctacaggacagcgccttttaaatcccagaacatggcccttaattcctacataactccggaagggctggagatgggacgggcccaggccgtacaggcggaggcggcgggaattgtccctaatgcggatatgaatcccattcttttaaaacccaccacagatgtgggaagccaggttatcgtccatggaatttccaggggcaatatgaaggccagggattattttgcctgtaagaaatccctggtgccggatattatggcctcctaccggcggctggaggagcagtacgatgtcattgtcatagagggcgccggaagcccggccgagattaacctgaaaaccgatgatatcgtgaacatgggcatggcggacatggcggacgccccggtgcttctggtgggggacattgacaggggaggtgtctttgcacagctctacggtacggtggccctgctggcagaggaggagagaaagcgggtaaagggattaatcatcaacaaattcagaggcgacaggtccatactggctcccgggatttccatgctggaggatctgtgcggtataccggtggtgggggtgataccctatatggatgtggatatcgaggatgaggacagcctgagcagccgcctggagacaggaaaaggcaaagcacctgctgcggtggatttggctgtgatccgctttccgcgcatctctaattttacggattttaatgtgttttcaggaatccccggggtgtcgctgcgctatgtgacaagggcttgtgaccttggaacccccgacatggtcatccttcccggcaccaagaataccattcatgacctgctgtggatgcgtcagaacggtctggaggcggcaatccttaagctggcggaccgtcaggtgccggtgtggggaatctgcggcggctaccagatgatgggagaggtgctggtggacgaaaaaggggtggagtcggacctcccttcacggacatccggaatgggccttcttccccttaaaacggagtttgagaaagaaaagataaggacccaggtggaaggcgcgttcggccagctggacggctgccttggcgggttgtccggaaaatccattgagggatatgaaatccacatgggccgcacgtacattgaccgggaagagggggctgcggatacagccagaatcgtttcctggcgcagggaaccggaaatatgccgccccatggactatgtgatggaaacgggaaaggacaggcttttatccagaaaggccagaatggacgggtggaacaggggaaatatctacggcacctatgtacacggaatctttgacagccccggaatcgccaggacagtggcagaggccctggccgctgcaaagggcctctgcctggaacaggcggcggatatggattaccgcacgtacagacagcagcagtatgacaagctcgcagaagagctcagggagaatctggacatggctgccgtgtacagaatcatgggcatcagccaaaaaggaaaaatgggcatcagccaaaaaggaaaaggagaggagaagccggatgacggatatacagttggaacaggtactgccgggagacattgagaggcgcagttttgagatcatacaggaggaactgtccttacgggggatttatctggagcctgaaaatgaaatggttatcaagagggccatccacaccacggcggattttgactatgcacaaaacctggtattttccggtcaggcagtgaaaagaggaacagaggccttaaaagcaggagctgtcattgtcacggataccaatatggggctgtccgggatcaataaaaaagggctgtccgccctgggcggggaagccttctgttttatggcagatgaggatgtggccctgcaggcaaaggaacagggcaccaccagagctgtggccagcatggagaaggcggccaggctctacgggctgaaggggcgtccgctgatttttgccgtgggcaatgcgcccacggccctggtccgcatatatgagcttatagaagaaggactggccgcccctgcccttgtcatcggagtgccggtgggattcgtgaatgtggtccagtccaaggaactgattctgaccctggaggatacgccgtatattgtggcaaggggaagaaaaggcggcagcaatgttgccgccgccatctgtaacgcgctgttataccagattccggtgcagggcgttgcagaaagtacttaatacacacgctccggtctatttccggccgctccagcagtaggtgcagagcttgcagggggagattccgatggactttaccaggtcatccagcctgtggtaacgcagggtggtgaatcccaggcgcttgcggatttcctcaatcatctccttgtaattggcgctgtccgggtctgtgtaagtgtttagcacatcccgggacacattgtcgccctctctgtcccgtatgatgcgtctggtaatcagatccagctctgaggtggaacgggagaagttgaggtaggggcatccgaacataagaggagggcaggccgggcgtatatgcacttcctttgcgccgctctggtacaggaattccgttgtctcacccagctgggtgccccgcacgatagagtcgtcgatgagcagcagctttttgccgcggatcagcgcgtccacaggaatcagcttcatgcgggcgatcagatttctctggccctggttctggggcatgaaggagcgcggccatgtgggggtgtacttgatgaagggacgggcaaacggaatgccggattcattggcatacccgatggcgtgggcgatgcctgagtcgggaatgcccgcaaccacctcgggctgcgcgtcatccctctttgccagcagctttccgcactcgtagcgcatgctctccacattgattccctcgtaactggatgtagggtatccgtagtatacccacaggaaggagcatatcttcatttcttccctgggagggctgaccgtctccacgctttcaggcgtcatatatacgatctcaccgggccccagttctttgtagtccgtatatcccagattgatgtaagcaaagctttcaaaggaggcgcagtaggcatcatccttgtgcccgatgacaatgggggtccttccgaatttatctctggacgcatagattccttccggagtcagcagcaggatggacatggatccctctattttttcctgggcatagagaagcccttccaccaaggtggatttctggttgataagggcagccaccagctccgtagcattgatacgcccatggctcatttccatgaaatggatatggccgttttcgtaggctgatgccaccagctccgcctcgttgttgattttacccactgtggttatggcaaagctgcccagatgggactgtatcagaaggggctggggttcgttgtcggaaatacatccgattcccaatgttccttccagctcgtccaaatccccgtcaaacttcgtacggaagggggtattttctatattgtggatggacctcgtaaagccctggctgccgtatacggccattccgcctctcttagtccccagatgggagtggtaatccactccgaaaaataagtccagggtacagctgttttttgatgcaacaccaaatattccgcccatatgtcatacctcttttatctatgtgtttgttttatgttatcacagttgattgcggctctgtctgccggttacggacttatcataacatatattagtagtacaggacaatatgattgatatattatttatacttatgagaaactataagcatgcccggaggggccttccggtgaatattcacttgcgcgccgggatgacaattccatgcatttgaggtatacttgtgataaaacttgtgatgaattttctggagctttcagttatgatccggaaatgaggaggcttgcaaatgacagaaccagatggacagaatgagcggcagaggcagcaggccgtccgcctgaccgtggcaaaggacggcagtggtgactatgatacggtaggcgcggccctggaggccctgggagacaaagagggacctccgtcctgcattttcataaaagagggcgtgtacagggaacggctggaaattagaaggccgggaatcacattggagggccagtcagccggcggcaccgtcattaccggtggactgtctgccggaatgaccatggaggacggcagtaagcgggggacctttcggacttacagcgtgctggtagacacccatgattttacagcaaagaacctgaccattgaaaacagcgccggtccgggcgaagcggtgggacaggcgctggccctgtatgcggacggggaccggattctgcttaagggatgcaggctgctgggaggccaggacacactctttacaggtccccttcctccgaaggagatacaaaagaacggattcatcggaccaaaacagttttcgcccagaataaacggacgccactgctaccaggactgctttatccgcggggacatagactttatatttggcagtgccacagcttattttgacaggtgtgagctgtactctgccggcagggatacagagaaaaaagggtacgtgaccgctgcgtccactcccaaaggacagaaatacgggtatgtgttccgaaactgtcggtttacgggaaacagctcccgtgaaagcgtctacctgggcaggccctggagagattacgccaggacggtcctcattgactgctatctgggaccccacatatgccgtgaggggtggcatgactgggataaaaagaatgcgcgttccaccctgttttacggggaatacggaagctatggaccgggggcggaggaacaggaggcagtggaacaggggaaaagggaccattgtacatccagaccggactgggtttttatgcttacccgtgaacagatacaggattacaccatggagcaggtattaggcggaacagacgggtggaatcccggggcatatatttaagttaagaaggaagggatatacttatggatttataccgtatcatactggtggacgacgaggaagaggtcaggcagagcatcatcaggaaaattgactggacgggagccggtttctgcgtggttggggatgcggaaaacggggaggaagccctggagaaagtggaggcactggagccggacctgatactgacggacatcaggatgccctttatggacggcctttccctggccgaacgggtgaggcagaaatatccttcagttaaaattgtgattttttcaggctatgatgattttgattatgccaagcaggctatcaagctgaatgtgacggagtacatcctgaagcctgtgaatgtggaggaactgacggccatcttaaaacgtatcaaatccaacctggacgatgagattgagcagaaaaggaatgtgagtctgctgcgtgaaaattatatacgcagccttcctattctcagggaccagtttttaaacgagctggtggggagcactgtgcccggaaacgtacttaaggaaaaactggctgagtatgatatcccgctggcaggcgccaagaaatgggtggccgcggccattgacatagagccggaggagatccgggaggggaatatgctgcctctccacaaggagagggacctgattcctatttctgtcatgcaggttgtggaggaaaagctggggaactattgccgttcttccgtattcacttcctccaggacctcctggtctgagctggcccttattgctgccattgacgaggataacagccagacaggactgatagatgtgctgggggatatctgcaaggaaacaaagaagattctggaggtgcccatcactatcggcattggccacagctgccaggacctgggggagatcagcggctcctataagacggctgtggacgcccttggctataaggccattgtgggagcgggaagcaccatctatatcaatgatgtggagcctgtaagcgggggaaagctcagctttgacagcaaggacgaagcagagcttattgcagccattaagttcggtcccagggagaagatagaggaagcagtacaggcagtcatggataaaatgagcgatgcaaaggtgcatttcaggcagtgccaggcatatatgctcagcgtgtccagctccatagtccagctgattcagcagtatgacctggacctggaacagctggcggaggagggggaggagcagggggatacctttgccgtcatcccaaggatgatgaaaaaggaggactttgcccactggcttctctcagccgccctcaggatgaaccaggccatgaaccgggagcgggataataccatgaagcaggtcatccagaaggccaaggaatatattatggacaattaccaggatccggatttgtctgtggagaaaatatgccgccagctgcacatgagcccggcctatttttccaccatgttcaagaaggagacaggacaggcatataccgcctacctgacccaggtccgcctggacaaggcggtggagcttcttaacaagaccgatgacaagacctatgtcatagcggccaaggtgggataccaggagcagaattatttcagctatgtgttcaagaaacgtttcggggtttcgcccaccaagttcagaggggcaaaatagatacaacaggtctgccgcgccgcttttggcgggaacagggcaggcagcgtaaaggagcaggggacatgttgtttgagaagcagaggattaagctgcagaaggccagtatacggtatatcatattcatctactttacactgacggccctggccgcaagtatattcataggcatttccctgtattccaggctgtcgggccagatgtccgccaccatccgggaggagaaccagatactgattaatcagatcaccaggtccatggaggattacctgcggaccgtgatgaagctgtctgattccctgtactacggtgtcgtcaagaacgcggacctggccagcggttccatcgggagcgagatgacccttctctatgacaataacaaggacaatgtggagaatatagcccttttgtccaaggagggaaagctgctggaagccgtgcctgcggcccgccttaagacaaatgtggatgtcaccggtgaaaactggttcacctccaccctggagaaaacggaaaatatgcatttttccacgccccatgtccagtacatttttgacggcagcgagaaccagtaccggtgggtcatttccctgtcaagggcagtggagattacccggggaccttccacggaccagggagtcctgctgattgacatacgctacagcagcctggagcagctctttgacggggtaaatctgggaaatggaggctatgtctatttaattagcagcagcggggaaatcatataccacccccaggcccagcttattgactcaggaattgtacgggaaaacaacctggaggtatccggactcagggacggcaattaccggcagaccgtggatggggaggaacggaccgtcacggttaagactgtgggatatacaggctggaaggtggtgggggtgacgccccttgacggcgtgtccctcaacaatataaagacaaagctcctggtgattttcatgattgcctttgtcctttttatcatgaccattattaattcctatatctcatccaggataacagacccaatcaaggagctggagaaatctgtcaatgaaattgaggcaggtaatctggagacagaggtcaggagcggcggctcctacgagatacagcatctgggcaattccatacagaacatggcccggcagatacggcggcttatggacgatattgtggcggagcatgaatccaagcgaaagagcgagttcgacaccctccaggcgcagattaacccccatttcctgtataacactctggacatcatagtgtggatgattgaaaatgagaacctgactgacgcggtgcgcgtcgtgacggctctggccaggtttttccgcatcagcctcagcaggggaaagagcatcataactgtcagggatgagctggagcatgtgcgaaactaccttatgattcagcacatgcgctataaaaataagtttacttataccgtggaggcagaggatgaggtccttgacctggccagtctcaagcttgtcctccagccgctggtggaaaatgccatctatcacggcatggaatttatggacggggacggggaaatccgtatccgggcatggcggcaggataaggatttatttatgagtgtatcggacaacggcctggggatgacccgtgagcaggtgaaacggctgttcggggatacggatcacatgccgtcgggcaggggttccggtatcggagtgaagaatgtccaccaacgtatccgtctgtattttggcaatgactacggactggaaatccagtcggagccggatgaagggacaacggtcacggcccatctgccggccatcccctatgaggaagtaaagaaagagggatcctatgttaaataaaggaaaaatactctggtgcgtatgggccggcatcctggtcctgctgtttttgatgtcctccacggatctgataatcaaggaaaaaaagattgaggtatatccgatctccgtcataatagaaggggacaacgacgactactatgtaaatttcaaaaagggtatggaccaggccgcagtggagttccatggggatgtcagctttatcaccctctatgcctctgatgaccaggaccagcagatggacctggtaaaacgggaaatcagggacgggaccagggcggtgattctggctccggtaaagcctgaggaggcggtaaggggactggaggatatgaacccgggctgccccgtcatccttctgggccagtctcctgatgagggcgggactctggataccatcggtgtggacggcaggaagattggaaggctgctgggcgaagcggcggcttcccaggcacccagggatgtaccggtctatctcttttgcaggggactggactatggggacagcgcccaggtctacgagggggtccggactgtgctggatgagcggggatatcattaccggcttattgagaggaaaaaccaggacacataccaccaggccatacaggaaacggactctcccggaggcggcaggatcaccattatagcactggatgtgcagtcgctggaccaggccacccggatactggaggaaaacaccatataccagggccgggtggcagggctctacggcgcaggaagcaccacctccctgctcagggctctggataagggaattgtcacaggaatgactgcatataaccagtttgacgagggatatttaagcgtgaagcaggcagtggaagctattcagggtacgcgccagaagcagcagaccatgctggaggccatctatgtggatgaggataagttgagggataagacatacgagaaaatgctctatcccattgagtaagtgagaggggccggaagtaagaggaaacaagataaggaaaggggcattgcggtgaaagggaagtggatgtatctattggcagcctgcatgggggcggctgtccttataggtgtgtggcagtacatgggaagggaagacgggcggaaggcggataagaactctgtccgcatcggggttctgctctaccggggggacgacaccttcatcggcactctgcgcaccggcctggaggacaaggcaaaggaatatgaacaggaaacagggatcaaggtaaagctggatatcatggacgccaaggggagtcagaatacccagaacagccaggtggagcgtctcatttccctgggctgcgatgccctgtgcatcaacagtgtggaccgttcgtcggcctccatcatcattgacaaggccatggacgcaggaactccggtggtattctttaaccgggaaccggtggaggaggatatgaaccgctgggaaaagctgtactatgtgggagcggacgccaaggaatccgctgtgcttcagggagacatcctggtggatgcctataatcaggatacacgaaccctggatgccaacggcaacggcctggtaagttatgtgcttttggaaggggagaccagccatcaggactccctgatacgcacggagtggtccatccagaccttaaaggacgggggcgttccactggagaagattacaggaggaattgccaactgggacaggagccaggcatcagccctgatggagcagtggctgaaggagtatccgggacagattgagctggtggtcagcaataatgacgacatggccctgggagccatcgacgctatgaaccgggccggaatcggggccaattccattaaggtggtgggtatcgacggcaccccggtgggcataaaggctctggaggaagggtatcttttcggcacagtggaatcagataaggaacgctactcccaggccatatttgacattgcctggagtctgtccctgggccaggacccgaaggacagggtgccgcagctggaggggaattattactggtgtcctcagcgggcgctgacccagactgaggcaaaattgcttaaaaaccagtgattcatatcagaaacaccgatgaaaagagataaaatcgaagaaattttataatcattctataaaaatcatatggaaaaatgcacaaccgggtcgtataataaacttgttgttaagcaaaaacaaccaaagtcaacaaaattataagggaggaattaaaaatgaagaaagcattaagtgttgctcttgcgtgttccatggcattatcactggttgcctgcggaggcggcagcaagccaacagaagcaccaaccacagcagctgccggggataccacaaccgaagcagcagcagacacaaccgcggcagacacagcagctgcaccggaagcaggcgcagaggtggcaaacaaggataagcctttagtatggtttaaccgccagccctccagcagtgctacaggacagcttgatatgacggccctgaattttaataaggatacatattatgtaggtttcgacgcaaatcagggcgctgagcttcagggtaccatggttaaggactacatcgagaagaacatcgactcaattgaccgcaacggcgatggaatcatcggctacgttctggcaatcggagacatcggacataacgactctatcgcacgtacaagaggcatccgtaaggctctcggcaccgcagtagagaaagacggcaatgtcaacagcgatcctgttggtacaaacgcagacggtacagcaactgttgtacaggacggctccatcgaagttggcggaaagacatatgttgtccgcgagcttgcttcccaggagatgaagaactctgcaggcgctacatgggatgctgccacagctggtaatgcaatcggcacatggtcttcctctttcggcgatcagattgatattgttgcatccaataacgacggtatgggcatgtccatgttcaacgcatggtccaaggacaataaggttcctacatttggctatgacgcaaacagcgacgcagtagcagctatcgctgagggctacggcggcactatcagccagcatgcagacgtacaggcttacctgacactccgcgtactgcgcaacgcactggacggagttgatattgatacaggtatcggcacagcagacgatgcaggcaatgtcttaagtcctgatgtatatgtttacaaggcagatgagcgttcctactacgcactgaacgttgctgttactgctgaaaactatacagatttcacagattccacaatggtatacgcacctgtatccaatcagctggatgaggctacccatgctacaaagaacgtatggctgaacatctacaactcagctgataacttccttggctcaacctatcagcctctgctccagaaatacgataagcttctcaacctcaaggttgactatatcggcggcgacggacagacagagtccaatattacaaaccgtcttggaaatccaagccagtatgacgcatttgccatcaacatggttaagacagacaatgcagcttcatacacatctctgcttgagcagtaatattcattgaaataaagatgtactgttattagggagaagaaattctccctaatattaaatattgaaacctatcaatctacatatacaggagtaaaataatggcagataagaaagatgatatcgtcttatcaatacgcggtatgagcaagtccttcggccgaaacagagttctggaccatatcaacctggatgtgaagcgcggaaccgttatggggcttatgggtgagaacggagctggtaagtcaaccatgatgaagtgccttttcggcacctaccagaaagacgagggaaatatcttcctgaatggcaaggaagtaagcttttccggaccaaaggatgctcttgaaaacggcattgcaatggttcaccaggaattgaatcagtgtctggaacggaatgtaattgataatttattccttggacgttatccggtcaattccatgggtgtaattgatgaaggcaggatgaaaaaggaagccgccgagctctttagaaaattgggaatgactgttaacctcacccagcccatgggccgcatgtccgtatcacagaggcagatgtgtgaaatcgccaaggccatctcctacaattcaagggtgattgttctggatgagcccacatcctccctgaccgtgcaggaggttaacaagctcttcgagatgatgaggatgttaaaggagcagggaattgccctgatttatatttcccacaagatggatgagatttttgaaatctgcgacgagatatccgtgcttcgggacggcaacctggtcatgacaaagagcaccaaggatgcaaacatgaatgagctgattgcggcaatggtcggccgttcccttgataaccggttcccgcctgttgacaataccccaggtgatgtgattctgtccatccagaatctgtctacaaagtttgagcctcatttgcaggatgtttcatttgacgtaaaagaaggagagatattcggactgtacggtctggtaggggcagggcgcacggaacttctggaaacaatctttggtgtccgcaccagagccgcaggacgcgtttattttaataaccgccttatgaatttcagcagcgcgaaggaggccatggagcatggctttgccatgattaccgaggagcggaaggcaaatggcctgtttttaaaaggagaccttaccttcaataccaccatagccaatctgcagcagtatatgtcgggtatagcgctttccgatgcaaagatgataaaggctacgtcaaaggaaatcaaaatcatgcataccaagtgcatgggccccgatgatatgatttccagcctttccggcggcaatcagcagaaggtcattttcggaaagtggctggagcgcagtccgcaggtgtttatgatggacgaacccacaagaggaatcgacgtgggtgcaaagtatgaaatatatgagcttatcatcaatatggcgaagcaggggaagacaatcattgttgtttcttctgagatgccggagattctcggaattacaaaccgtattggtgttatgtcaaatggacgtctttctggaattgttaatacaaaagagacaaatcaggaagaacttttaaggctcagtgcaaaatacctataagggggattcatggatatggcgaaaggaaacaatgagactcttacggctgaacaggaaatgcagctgcgccagccaattgaggattatgttggcgaaattcagaagaaaatcgacagtctcagagcggacggcacaaacagagtagtcgctctgcaaaataatattgatgcaacaaaaagagaccgttcccttacaaaggaagaaagggaaaacagaattgcggctaacagcgcggagatggaaaaagcaaaggctgttgaggcaaagaacaaagacgagattgcaaaattaatctccgaagcggagagttatctcaaggaacattttgataaggattattatttgccgttaaaggaaagctgtgagcgggaaaaagcgcttgcaaaggaaaaatatggcattaaagttgcggaactgaacaaagaacatgaaaataccctctcaaagcttacggaccatcaggagataaaggacgagaagtatgttcataagaaccgcctgtttgacgcaaagatggacctggacaaggagcttcagcggatcaaagacagaaggcatgcggcatttgtctggcagtatcacctgattgatatgctccgcctgtctaaattcaccttcatggagaccagagcgcagaaatgggagaactataaatatacattcaaccgcagaacattcttactgcagaatggtctgtatatcgctattatcctgattttcattggactgtgtatcgctgctccggtgatgaagaatgttaaactgcttacctataataacattttaaatatcctgcagcaggcttctcccagaatgttcctggccctgggcgttgcgggtcttatcctcctgaccggcacggacctttctatcgggcgtatggttggtatgggtatgaccactgctaccatcatcatgcatcagggcattaacacaggtgctgtgttcggacacgtgtttgactttacaggcatgcccataggattaagagtggtatttgcccttgtaatgtgtattatcttatgtacgtgctttacggctatcggcggtttctttaccgctaagttcaagatgcatccgttcatatcaaccatggccaacatgctggtcattttcggacttgtcacatatgccacaaagggcgtatcctttggtgccattgaaccggctattccaaagatgattattccaaaaataaacgggttcccaaccattatcctgtgggcagtggctgccatcgtaatcgtttggtttatctggaacaagaccaccttcggcaagaatttatacgcagtaggcggcaacccggaagcagcagctgtttcaggtatctccgtattcggagtaaccatgggagcattcattctggcaggtatcctttacggattcggttcctggctggaatgcgcaagaatggtaggttccggctccgccgcttacggccagggctgggagatggacgcaattgcagcctgtgtggttggcggcgtatcctttaccggcggtatcggtaagatttccggcgtagtagtcggcgtacttatcttcaccgtgctcatctactcccttaccattctcggtatcgacacaaacctacagttcgtgtttgaaggcatcatcattataacggctgtaacacttgactgcttgaagtatgttcagaagaagtagtaaggaaggttaggtgtttccgtccgtgattgaaataagcccgggggctgtggatacggcttcgggactagtagttctaggacgctgaaaatcggctgaatacaagaggctggctgccaaaactcgcggccaagcctctttctatatttagatactgagctcagacagttgtcagccagcctcttaacgccgctttccaccgtccaagaactacacgtccctgcagatgcatccacatcccccggccttatttcaatcacccactacgcacctcccttcgccaaaaaagagtgatgcgccagccagactatcgttttttgtcagatataatacctggcatataaaatgatggaagaattttcacctggcatttttcgttttatctgcgccatggatgtaagtgatgcagaagcatcgggtacgtagtgggtaggggggtgtgagatgcatctacaggggcgtgtaggggttaggctgcgggaaccggcgttaagaggctgactgacaattgtctgagcccgatatctggatacagaaagagactgaccgcgagttttggcagtcagcctcttgcatttagccggtttccggaggcttagccctactagccccgcagccgtatcccactccccctctccctcacggacggatgaaccttctcttcctccgcatcccttacttcccacaagctaacctgctattttgatactcccttgtaaacgtaacatccctcccaaaccactccggggcctggaaggccatggcttcttcttcggaggtgaattccacctcggccaggaggaggccggcgtagcggccttcaaagacgtccagttcaatggtcagatggtctgagccatccagcgggatgagatagcgctttttggtgagtaccacgccgtcggccttggggagcaggtgggcgtaggcttcccgggtcagggggaggttgtattcctccctggacaggagtcccttgcccttgtaggtgagatagaagctgtcatcctcctgacggatgcggaccaccggttccgtgcagagataggcctgttcaatctggtggaagggatgggcgtcatagccctccggaagacaggggatcaggaatttacgttcgatttccatatgggaaaacctccttgctgtgattgtcgattagtggattttactaagtatttttattttttccattttacaatcatatcatttaactcttttcctgaaaagtgataaatgataaaataaaattactatgcgataaatggcggaaagggagattatcatggcaaaggtttatgcatttcttgcggatggactggaagaggttgaatgtcttgcggttgtggacgtgctccggcgttccggtgtggaggtgacactggtgtctgttacaggagacaggaaagtaactggttctcatggaattgagttggggaccgacgccctgtttgaggatgtgaacccggatgtggcagatgtgctgtttttgcccggaggaatgccgggaactaacaatctgaaagcacatatgggtctgagggcggctgtggagtgtgccaacaagcagggcagaaggattgcggccatctgcgcggcgccaagcatcctggggagtatggggctcttaaagggcaggacggctacctgctatccgggatttgaggaccagctcacaggtgtgtcctacaccagccagggtgttgtgacggatggcaacatcaccaccggcaggggcctgggatttgcccttgacatgggactggaactgattcgcctgcttcagggtccccagcaggcccagaagattgcagcggcaatccagtataactggaaatagtatccggatgagaaaaactcctgttctgttctatatcatatggatgtgggatggaatggaagttttttttgtaaaaaacgctggtgtttttaaaatgagcatgctataatggtacattgaagtgtagcgccctcatggattatgggcgaaccacatatattttaaggaggaacccgtaaaaatgagtgtacaagtagaaaaattagaaaaaaacatggccaaactgacaatagagttaagcgcagagcagtttgaggatgctatgaaaaaagccttcaataagagcaagaacaagtttaatattccaggcttccgtaagggcaaagcacctcgcgccatgattgaaaagatgtatggcgaaggcatcttttatgaggaggctgctgatgaggccatcaacgcaacctgcatggaggcaatgaatgaaagcggactggagatcgtttccagaccggaagttgccgtagagcagattggcaaggacaagccgttcatctataccgcaactgtagccgtaaggccggaagtgaccctgggcgagtacaagggcattgaggtagagaaggtggatgcagctgtgaagcctgaggatgtggaagcagagctcaagaaggttcaggagcagaacgcaagacttctgaccgtagaggacagaccggttgctgacggcgaccagacagtcatcgacttcgagggatttgttgacggcaagacatttgacggcggcaaggcagctgattacccattgaccattggctcccattccttcattgatacatttgaggagcagctggttggcaagaacatcggcgaagagtgcgagattaacgtaaccttcccggaggagtaccatgcggctgaactggctggaaagcctgcaacctttaaggtgactgtaaaggaaatcaaggtaaaggaacttccggaactggatgatgagtttgcaggagaagtttctgaatttgacacgctggatgaatacaagaaggatattgaggcaaagattcttgagagaaagcagaaagaagctgcttccgaaaacgagaaccgtgtggttgacaaggtagtggcaggcgcttccatggagattcctgacaggatggtggaaggccagattgacaacatggttcaggatacagcccgccgtatggagagccagggtctgaacatggatctgtacatgaagtatacaggcatgaccatggagcagatgagagagcagatgaagccacaggccttaaagagaatccagaccagactggtgcttgaggaagttgtaaaggctgagaacctgcaggtttccgacgaaagactggatgaggagattgccaagatggcggccgcttaccagatggaggctgacaagttaaagggttatatgtcagaccgtgataaggaccagatgaaggaagatattgctgttcaggaagcggttgatttcctggtagcagaagcaaaactggtataattcacatatgatacggggggttcacagcgcttatttacctggctttgaatctccctggtttgttataagtgaactggtcaccgcaccggacttgtgaaatacctggccgggagacggtggcatgtatcgcacgtaagtgtctgaaaaacagacgtttagtgctcataactaggaggatggttatatgagtttagtaccttatgtcattgagcagaccagccgcggcgagcgttcttatgacatttattcaagattactgaaggagaggatcatattcctgggcgaggaagtaaacgatgtgtccgcaagccttgtggtggcacagctcttattcctggagtcagaggacccaggcaaggatatccatttgtatatcaacagcccgggcggttctgtatctgcgggatttgctatctatgataccatgaactatattaaatgcgatgtatctaccatctgtatcggcatggcggccagcatgggcgcgttccttctttccggaggggccaagggcaagcgtttcgcgctgcctaatgctgaaatcatgattcatcagccttccggcggggccaagggccaggccacagagattaaaattgtggctgaaaatatcttaaagacaagaaagaaattaaacgaaatcctggcagcaaacacaggaaagcccctggaagtaattgagcgcgatacagagcgtgacaattatatgtctgcactggaggccaaggaatacggccttattgatgaaatcattgcacatcattagtgctgcagtacagcgctgaggcatcaggccggtaacgtaaaaaagcaagtaaaggatatgaaaggttaggtatcgtatgccaatgagaccagatgacacgattcggtgctccttctgcggaaggacacaggatcaggtacggaagatgattgccggagctggcaacaacaatgtgtatatctgtgacgagtgcatagaattgtgctctgagattctggaagaggagctggaaggccaggatgaaggggagagccctgcgctggccgatatacgtctcctgaagccaaaggaaatcaaagcatttttagacgaatatgtcatcggacaggatgacgccaagaaggtgttgtccgttgcggtttataatcactacaagagggtgacggcatgccagaacatggatgtggatgtgcagaagagcaacatccttatggtggggcccacaggctcaggtaagacctatctggcccagaccctggctaagattctcaatgttccctttgccattgcagacgccactgcactgacagaggcaggatatgtgggcgaggatgtggagaacattctgttaaagcttatccaggctgctgattatgacatctcccgtgccgaatacggcattatatatattgacgagattgataagattaccaagaagtccgaaaatgtatccatcaccagggatgtttcaggcgaaggcgtccagcaggcgctgcttaagattctggagggtacagttgccagcgttccgcctcagggcggcaggaagcatccgcaccaggagcttcttcagattgataccaccaacatcctgtttatctgcggcggtgcctttgatggcctggagaagattgtggagcagcgtctgagcgctggttccattggtttcaacgccgaggtggcaaataagaacgatctgaacatagatgagctgctcaagaaggtggagcctaaggatctgaccaaattcggactgattcccgagttcataggccgcgtgccggtgatggtttcactggaacagcttacaaaggatgccatggtgcgtatcctgtcagagccgaaaaatgccctgatgagacagtatcagaagctgtttgagctggacaatgtaaagctggaattcacccaggaggctctggaggagattgcacagctggcagtagaccgcaagattggcgccagaggactgcgctctatccttgaatcagtgatgatggaccttatgtatgagattccgtccgacgattctatcggaatctgtaccattaccagagacgtagtgaaaaaggcaggacagccggaattagtataccgcgatatgcctcctgcatctgcccggaagccgttgtcagaacggctcagaggggacagtaagacaggagaaattgcgtaggctgtcatgctcctgtgacaatttagaagagagaaagggccgctgcaaatcagatatgacccggaccagaaggcctgttttccggccggtccggcacctgcattgcagcggcttttcaaatggttaagatacaagaggtgaagattgagaatgggagaacaagtgattacgatgcccgtggtggctctcaggggtctgaccatacttccgggtatggtattgcattttgatataaacaggccgaaatcggtggcagccgtagagcgggctatggtgggagaccagaaactgtttcttgtggcccagagacatcctgaaattgtggagcctgagcagggggatttgttccaggtaggtactgtggcagtggtgaagcagctggtgaaactgccgggcaaggtggtacgtgtgctggtggaaggactggaacgcgctgagcttttatgcctggaagctgaggaaccggctatgatgggcgagattgccgccatagaagcggaggaggatgatctggacagcctgactcaggaagccatgctgcgtatcctgaaggacaaactggaagaatatggaagagttaatccgaagattacaaaagaaattctgcctaatctgatgattattacagatttaaatgagatgctggaccagatcgccattcagctgccatgggactataccatccgccagaccgtgctagagaacagttctctgtcagccaggtatgaggtagtgatgcatacgctgctgaccgagatggagatatacagaattaagaaggaatttcaggaaaaggtaaaggccgatatcgaccagaaccagaaggaatatattctcagggagcagatgaaggtcatccgccaggaattgggagaggacgctgtgtcggacgcagacgaatatcagaaaaagctggatactctgaaggccgacaaggaagtaaaggaaaagctccacaaagaaatagagcgtttccgcaacatgccggccggaagccaggaggccaatgtgctgcgcacctatgtggaaaccctgctggacctgccctggaagaagatgtccaaggacaatgacgacatcaaacatgccgagaggatactcaacgaggatcactacgggctggagcaggtaaaggagaggatcctggaatacctggctgtccgcgccctgacgaagaagggcaccagccctatcatctgtctggtgggacctccaggaaccggcaaaacatccattgccaggtccgtggccagggctttgaataagaaatacgtgcgcatcagcctgggaggtgtccgggacgaggcggaaatcagaggccacaggaaaacctacgtgggcgccatgccgggccgtatcgtggaaggcatgcgtcaggccagtgtgagcaatcccctgatgcttttggacgagattgacaaggtcagcagcgactataagggtgatacctcctccgcgcttttggaggtgctggacggggaacagaatgtaaaattcagggaccactatgtggaactgcccattgacctgtcccaggtcctgtttattgcaacggccaacaccacccagaccataccggggcctttactggaccgcatggagctgattgaggtcaacagctatacggaaaatgaaaagtttcacatagccagagactacctggtgacaaagcagatggagcgcaacggccttaaggagggacagattacattttccgataagagccttgaaaaaataatacacaactataccagggaagctggcgtcaggaatctggagcgccgcatcggggatgtatgccgcaaggctgccagacagttcctggaggataagaagaagtccatcaagattacggagagtaatctggagaaatacctgggcaaggaaaaggtgacctttgagaatgccaatgaggaagatgaaatcggcattgtgcgcggcctggcctggaccagtgtgggaggggatacccttcagatagaagtcaatgtaatgcctggcaagggaagtctcctgatgaccgggcagctgggagacgtgatgaaggaatcagcccagacagccctgacctatgttcggtccgtgtgcccggagtacgggattgacgacgattattttgagaagcacgacctccacatccatatcccggagggagcggtgccgaaggacggaccttctgctggaatcaccatggccacagccatgctgtccgcggtgacaggtaaaagtgtccaggccaaggtggctatgaccggggagataaccctgcgtggacgggtcctgcccatcggaggactgaaagaaaagatactggcagccaagatggcccatatagagaaggtgctggtacctgacaagaaccgtccggatatggcggagctgtccaaagaaatcaccaggggactggacattgtatatgtaaaggccatggaggatgtggtttcggaggcctttgtttagagcgcggataggaattaggagaaacagatatgataataagagacgtgaatctggagacagtatgcggcgtgaccagcaagctgccggagaatacactgccggagtttgcatttgcgggcaagtccaatgtgggaaaatcatccctcatcaatgcgctgatgaaccgcaaagcctatgcaagaacctcctcgcagccgggcaaaacccagaccatcaatttttacaacatcaacggagcattgtattacgtggacctgccggggtacggctatgccaagatagcggttgcggtcaaggaaaaatggggcaagatgatagagcggtatctcaggaattcacagatgctcaaaatggtgttcctgctcattgatatccgccatgaaccctcggccaacgacaagctgatgtatgaatggattatctttaacggataccaccctgtcatcattgccaccaagctggacaagattaaccgcagccaggtgcagaagcacgtaaagatggtgcgggaaggccttggcatggaaaaggacggtatcattattcctttctcggcagagacaaagcagggcagggatgagatatgggacctgattgagggcagcctgtaggctgtttgtattcctgttaaaaagcggatttcataaagtgaagaaaggcctggtttcctgacagacgggtattgcccgcaggaaatcaggcctttttgctaccggtaattctcctttaccagctcaataaaatatcttccataggacggaatataccggcccttctggtataccgcatacaaggtggtcacagtggcggggtctcccacagagaagcacagagggggattgtaaaagtgtatttttctgacataggattccggggccagacagagggcggtgccggaggcagccagacggatggcgatatcgctgttgcgggtaaacaggaggaccttgggggttaagccggcctttttaaacagtcctgccgatatacggcccgttgtctggtcccgggggtggaggatgtagggctcatgttctgtatgtcttatatccacccagggatagcgaaagccttcccttgcaatggctttttccgccaggggatgaccgggggctgccaccagaacgatttcttcctgccccaggtactccgctgtctgagcgggatccgtggccgtggaattatagatggcaaagtccacattgggggaaagcataagctgcttttcaacggaatgtgattcctccagaagattaatctgcacgtccgggtaacgagaatagaaccggctgagtacatccggcagcaggcaggaaccacgcatcagagccaccgctatggtcagctgccccttttcctcgcctaataaatcctcgcattccgaattccagtcagaacatatctggcagattttttccgcataatccatgtagcggttaccgatatgggttggaatcaggtcattgccaatacggctgaacagaggggagcccagctgacgttctatgttcttcacagccttgctcagggcggactgtgtgatgaacagggagtctgctgcctttgtgatgcttccatacctgcgtatggccagcatataccggatttcctttgagatcatgtatgtacctccaatgaaaataattcatgacttagatgattattatgactttgacacctacctatgcacattgtataataaaaataatatacaatcaagggtttcatcaatattgctgaatggaggcgccatggaaacagagagagcggattttctcgtaagaggagcaatggtttacaacagctactttaaaaagtttgtgccggcggatgtgtctgtgtcaggagggaaattcttatacatagattcccgaaggtccggcgcggtggaggctgatgagacagtggatgcagagggcctttatatggtgccggggctgattgacatacatatgcacatcgagagctccatgctgacgccgggagcattttgcagacggctggcagagtgcggcgtcaccaccattgtgtcggagcctcatgagatggccaatgtgaacggaatgcagggcgtgctggatatgataagggcaggggaaaacagcccggttgatatcttttacgggattcccagctgtgtgccctccacctcccctgagctggagaccaccggaggcatcataacctgtgaggagatggaaggcctgaaggaaaatccctgggtggcctgtgtgggagaggttatgaattaccgtaccattatccgggaaaaccagctggaaattacccggttcctcaaacaacttcgtgaaaaggaccggatttttcccattgaaggccattgccctgcactgctggacctggatttggccaagtttctgtacctgggcatcaatggagaccatacggagcacagcttggaagaactggaacagaggtttgccaacggcatgtttatggaaatccaggaaaagatgctgcgcagggaggtactggactacataagggagcatgggctggaggaacatttctgctttgtgacagatgatgtgatggctgacacactgtgtatccagggacatctggacgccctggtccgcagggccatggaactggggatgccggcagagcaggcagtttataacgcctcctttaccccggcaaagcggatgaaccttttggaccggggggcaattgctccggggaaaatagctgacttcctgctgctcagcgatttggatacgtttgctgtctctgccacctataaaaatgggaaatgtatttggcgcaggggacaggacgaaagggaacagcccgcccaagagcagcatggcccggacaggggacaggatatgcgctttccggagccttattaccacagtatccatctggaattccaggagcagagccggtttgaggttcccatggaatcggattcaggcacggttatggtccgtgtcatggaaatccaggacgggtccaccaagacaaaggaaatcatcatggagatgcctgtgagggacggtttccttaaatgggaagggacgggctgtctgctggccgctgtgtttgagcggtatggaaagggccaggcagtgggatacggattggtaaccggagactgtcacaagcggggagccgtggctaccagctacgcacatgactgccataatattctggtggcaggagcaaatcctgcggatatgaagcttgctctcaaccgcgtcattgagatgcagggcggcatggctgcggcggacgggggaaggatacaggcagaactgccccttcatgtgggcggcatcctgtcggaccgtcctgcgaaagaagtgggggccagccttgcaagggtccgtgaggccatgacgggcctgggttacaggcattataaccccattatgtcgttctgcacgctgacgctgccggccagcccggccctgaagctgacggataagggactgatagatgtaaaagcctgcaaaattgtgccgttaaaggtagaaggacagagaacacaaccgtaataactgcaccggagaaaatcaagaggaggattaatcatgtcaaaggaaactgaaggtacagccaaaagaggagcttccaatacctggattgacaggcaattccatctggcagagcatgggaccacggtaaggacagagattctggccggtatcaccacatttgtgaccatggcatatgtgctggggactgtccctaatatcatggcaaacgcagggctggacagaggcgtcatgctcacgtccatgattttactgattattgttaccacagtggccatggccctggtgacaaaccgcccctttgcactggcgcccgggctgggcagtgttgcaatcgtgtcgggaatgattgcgaacagcgggatttcacctgaaatcacagccggcgtcatattctggagcggcgttatttttattgtgatatcctatatcggcctcagggatgcggtggtaaatgccattcccgccagccttaagcatgcggtcagctcgggcgtgggcctgttcattgcgctgcttggatgtaagaacgcagggctgattattgccctggaaggcaaaaataacctggccttcggcgacctgagttctccctccgtgctgttggcgctgattggattcctgctgatactcatcaccaagcagatgcgggtgccgggatatatgattttttccattttgattaccacgctggtcgggattcccatggggcttaccaggatgcctgaggcgtttttcatggcgcccagctctccctttggccagtttatgaagattgattttctgggagccctgcagtttgcctatctgccctttctgattgccatgtttgtaccggatttcttctccaccttcggcacggccctgggtgtgggcgcaaaggccggatttctggatgaggacggcaacctgcccggtatagacaaggtgttcaaggtggatgccgtggcaaccgctctgggcagcctgttctgcatgccgtgtatgaccacctatctggaatcctcctccggcgtggaggcaggagggaagacagggctgacacctatttccacaagtgtctgttttgcctttaccctgctgctgacgccctttgccctgatgattccgtcggccgcaacggcccctgcccttatcatcatcggagtcggcatgctaagttccatgcgaaacatcaattatgatgattttacagaatccttccctgcgtttatctgtgttgcctttaccatattcgccaacaatattgccaatggaatctgtgtggccctgccggtttacgtggtgctgaagctggcttcgggcaagattaaggaaatgcccaaaatcatgtatgtactgctgggagtatgcgtgctgtacttctacagtatcattaaatagtttatgtaagaacgctggattacgccattctgcacggatgctttttgcaggtggcaaggctcaccgccaccagcaggattccgcagacaagagcgcctggaacggtctcgccaagcccccagggattgccggccagtttccagcccacacataccacaaagccgcctgtcatggcagatatgatgccctggctggtggcttttttccagtacagggccgccagggagggcaggcctgccgccgccgcgtagaaggaccaggcaaacatgaggacattgtaggcgtttttaatgtatagggcgatgattaaggcgcccatggccagtaccacggacatgacacgggacatgagtatttcatgcttttccgtcatttccggcatgaaattttttcccaggtcatgtacaaaggtctggaccgataccagcaggtagctgtccgcagtggacatcatgactgacaggataccagccagagccagtcctgtaaggccgggaggcaggatgcttacagccagggcaggcaccacggcatcagagcttccgtaggaggccaccacgtccggcagaatctgccggcctgccagacccatgaagaaaaccagggcaatggttaccatgtaaatggaagtgccccagaacatgccctgggttgcggcctttttgctcttggcagcaaaggccctctgccacatctcggctcctgccagggtaaataccagataggtgacaatgtcgcccaggatactgccgttgatatgaggcaccaggtaggatttgtccaggttctgccagaaggaggaaaaaccgcccagataacgaatgctggaaaagggaatcaggatgtagacaaagataatcagcatgaaaaactggagcacgtccgtgtacaccacgccgaagagaccggatgcagcggtatagatgatgaagatgagagtggctgccagggcgccggcttcatagctgatgccgaattcatttcccagcatcttgatgatggtggcggtggcagtcacctgggcagccactgtgcccatcatggtgaagacgatcatgaaagccaggatacagcgggcagtgctgttgaacctgtagttgaaaagttccggtatggagttgatgtttctggtgaagccaacctcctgtatgcgtccggcgatggctgagaagataaacatgccgatgagataggggatagcggtcataaccgccttaaagcccgtggtataggcaatgcccgcacgtcccatcatggcgctgcctccgatgatggacgcgcacacagtggcagtcagcacaaaggggcccagggttctgcctgcaacgtagtaatcgcctgtattcttgattcgtttgacgaaccatacgcccacaaaaagcatgcctatcatgtagaggacaatgatgaccagatccaggttggtaagttcatgcataaatcagatctcctttcgttggggagccgccttgggagggggaggtgatgaaaaatatctttggatgtattcagttttaggtaaaggaaaagaacggacttaacaaaagaaaccgtctgcatggatgcagacggaaaagtatacgacaatacagcaaaatgatttaccagaatgtccctgtccctcttccgcctatgagattagctgccgggttcgggaaagaaaggttccctatcatccgggagccgcgacaggctcagacggatgaatacacccctaaaaatcggttctcccactgctgcatagcagcattaagcgacttggtgattatgttaacattatcttaacattaatatatcacagaaacaggagcgtgtaaagaaataacctgtcagatgcagcccatattctgtcagattcaactcagatcctgtcagattcaactcgacatatccggcatttagcgtataatagatacaggtatgaattaaataagacagccggcggcaatggaattttgacggcctggctgtatctggaggtattatgtaatggaaacgggacctatacgggtggcaatcatggcagacacccatggagtgctccggccggaggtggaaaggattctggaaacctgcgatgtgattgtccatgcgggggactttgacaatcagatgctgtatcataagctgaatgtggaccagcccctgtacgcggtaaggggaaataacgacaggggatggtcggggggacttggtcaggtgaaccggtttgaaatcggaggggtcaaatttatcatggcccatgagagagtggatatccccagcgtgcttaaggatattcaggtggtcatattcggccattctcatatgtattatcagcaggaaatcagcggaaggctttggctgaatccgggaagctgcggctataagcgttttaccctgcctctttccatggctgtgatgaccattgaggacggaacgtatgaggtggagaccgtctggctggaacatgggtacgggacgccaggagcagccaccagccagagggaaaaggccaaggccagcaagtatgaaaagcagcagaaacgctataagcagaagcaggcaaagggggaaggccaggcggataaggcaaagggagcggtcaaggcagccagatatgggggacagccggcagccaggcaggaagctgtcaaacctgccccagatcaggagaaggaatatctattccttatagcgaaaatcctgcgcctgagaaaagccggtgaatccagagaatgggttatccggaacctgggggagaatttcaggctggcatcaaccatatacgatatatgcgaaaaaaggccggactcaaatgcccggcagattttggaactgttattggaacaaatctctttttagtgggaacgctttccggtggatggaacacaatgggacacacacatcccggcggaggacacgccatgggacacaccggcacagcaagtcaggataaaagtgaccgcatgacgtgggcatagatttcctggctttttgttttccaggtattgcacatggcttctgcctgctccctgtcagggacggataaatccagccggataagggtcgtcttattttcgcggacttcacagtggacaatgtagtcctgattagtccccttgtagaagtcggccgttgttcccacctcctcccggaggcggaacttgttctccttgaggtactggtccatgtcctcaatgatggcagtggatatgttcttgccgaagaagttgagggtttcctccccttccctggtgatgtcataccgggtgctgttgtggctggcctccttgtggaccaggccggcgtcttccagctcatttaaggcctgctggagggtgaaataggtggtgtattcatgctctgtgaaaaagttggtgagctgggcgttcgtcagggggaagttcacctgcttcaacatatagagattcatcagtttgtacaaggtcataggttcagtaagcatatcacacacgctccatcaggattttcttattattttctaatgtggtcctttaccgcgctgctgactacatctgccacacggggatcaaaggcttcgggaagtatgttctcgtcgcttaaatccttttcatccaccagcccggcaatggcttcggcggcggccagcttcatttcctcggtgatggcagaagcgcggccttccagtgcgcccttaaagattccggggaataccactacattgtttacctggttagggaagtcggaacggccggtcccgaccacacgcgccccggcagcctttgccaggtcaggcatgatttccggtacagggtttgccatggcaaagaggatggcgtccttattcatggatgcaaccatgtcctgggttacgattccgggagcagatacgcccacgaagatgtcagcgcccttcatggcatctgccagagtgccggtcctgtgctccaggttagtcacgtccatcatcttttcctgcatccagttaaggccttctgcacccttgcttaggataccgctcttatcacacatagtgacatgggaaaatccgtaggtcagcagcagctttgtgatggcaatgcccgcggaaccggcgccgtttactaccacgcggcaatcttccttctttttaccggtcagcctgagagcgttgatgacgccggccaggaccacaatggcggtgccgtgctgatcgtcgtggaacaccggaatgtccagcctctcttttaatgcctcctctatctcaaagcatctgggggccgagatgtcctccaggttgatgccgccaaaggcaggcgcaatgcgcacaacggtctcaatgatttcctgggtgtcctgggtatccaggcagatggggaaggcgttgacgccgccgaattccttaaagagaacagccttgccctccatgaccggcatggcggccagggggcctatgttgcccaggccaagtacggcgcttccgtcggagacaacggcaatggtgttggatttgatggtgtaccggtaagctgcctccggatctgcggctatcaccttgcagggctcggcaacgcctggggtataggcaagggccaggtcttccctggaagctacctttgcttttgatgtggtttcaagttttcccttccattcctcgtggagcagcagtgctttttcattggttgtcataatccattccgtccttttccttatatagtagaaacacaaaaatgcatttttatatatcataacaattttgggagtgtttatcaagttccttttgaaaatggtgctgtttggcagacctgtatgtttgaaatcagttggtgtgggggcgcctgcgcggcggcaggaaccgggggaggggaggacaaaagggaaatggaagaacatggaacccatggattgaacaaaagatgtaattaaaacttttaaaaccacccgaaatgtgatatcatgttacgtaagtgtggacattttacacagaaggataaagatacaggtggtactatgagggaacgtattaaccgtctggccaggggaatcattgacaatggttcgccggagctggtgctggcaccggaacgggtggaggcgtcggttcctgcgggtgaggtcatccgtggcgagatattggtgagcagcggcaataacctgcatataaaagggctggtgtattccagccatgaaagggtccgggtggtgaacagtgcttttggcgggctccgcaaccggattatatatgaagtcaacgtgggtttttcagagcatggggacgaaatcaagggatctttttacctggtcaccaatggcggtgagagggagattccttattctttgcgcgtacaggccggtgatgccggtgaggttctgggaaacttaaagactcccagggactttgcggtgctggctaagaaggacctggaaaaagcgctgaggatgtttgagtatcaggattttacagaggcccccttcatgcaggattcccgggtccgtaccatctatgacgggctaaagggaagggccggcagaagaaatctgctggaggaattcctggtggccctgcaggtcaaggaaccggtaaagcttacgctggagacaggaaccaggatttatgagaatctgacaggaatcgcggaagattatatagatatagcggcaggaacctgggggtatgtgtcggcggacataaccgtggacgccccctttattgaactggggaccttccggattacggaccaggactttgtccagggccggtgcagagtggggtaccgcattgttccctccagacttcacagaggaaggaattttgggtgcatccgtgttaaatccctgcgggaggaattccttatttccgtggaggcagaggggcatcatgggtccggcagcacggagcgtgaatccggctcggatcggtttatggaccatgggagcttatataaatacctgtccctgcgtctggattatgaggcaggggtttatgagccggcccttctactgaaccagatgatgaaggagacagagcacctcagggctgattttccaggggatgcgagagccaagctgatacaggcagaacttcttatattaaacggcagggaggacaatgcatctctggctttagacgatgctagggatcatgtgctggcccacagggaaaagcaggtggaattgtactgcttctaccagtatctgcgcctggaaatcaagccgtctgtccagcagaaggaatcactggtccgttatatacgcaagcttttatgggaggatggggagatacggccttacctctttctgatgctggtgaagttggacgaaacaatggcacagaatccactggagctgtaccggtccatggcatccctgttcaatcagggctgctgcagcccgttcctctatgcatcagcctgccgtctgatggaagcccatccggatttgtttgtgcgcctgggtgattttgagattcagactctgtatctgggtgtacagaaaggaatcgtcagccgtgtaaccgctctgaaagcggcgggacttgcactggggcttaagcactacaggaagctggtggaacgtttattcacaaagctgtatcagacatatgaagagcaggagattctggaggccgtatgcagcctgcttatcaagggggactgcaaggaaaaggacgcatttgcctggtatgagaaagccctggaacagggagtaaacctgaccaggctatacgagtatttcctctattccctgccggaggattacggacacctgctgcctaaggaggtgctgctgtatttctcctatgataaggatttggacaggcacagccgccagatgctctaccggaacatattggaatacatgaacccttccgcggagctgtaccagaactacaccaggcatatggagcagtttgccatggaacagctgttccagtccagaatcaaccgttccctggctgttatttatgagcacatgatttataaggatatgatagacagccgggtggctagggttcttccgggcatccttaagtcctgccgtatccggtgcggggattccaggatgaagtatgtcattgtccgctatgaggagctggaggatgaggaagcatttttgctggaagaccagtctgcttatgtgcctctgttttccgagcgcagcgtcctcctgttccaggatgcctacggcaaccggtatctggacgtgaaacactggaaggtgtctgtcatggaccgtccggagctgctggcccagtgctatgaggtgtatccggaccatcccatgctcaagctttccgaatgcagggacatcgtgaaccgcggggtggagacagacgaggaggcagcgctgttggaagagatcgtgacgcagatgcatctgagccctgcctttgagggcaggctgatgcaggcagtgacggattattactgtcagaaggcgtctgaggataaggacggcgacggtgtattcaattgtgcttatctggtacagattgataaaaagcccatggctgtcaggcagaggcagcagatatgcgagaccctaatcagccagaattatatgcgggaagcttataatatgattcgggattacggaagccagtatatatccacgccgcggctgatgaagctgtgcaccaagaccatactgatgaatctgtttgaccaggacgacctgcttctgggcctgtcccaccaggtgttctgccaggggtgctatgacagcgtgatcctggactatctgtgcgagcatttcaacggaaccgtgtcccagatgtatgaggtcttgattcagggcgtcagggagcatgtggagacatatgatctggaggaacggctgctggggcagatgctgtttaccggctgctgcgaccagatggattccgtgtttgaactgtacatgaaacgaaagaccacaaaggaaatggtggtgaaggcgtattttacccagaagagtgtccagtacttcctggaagaaaaggatatggaccagagggtgtttgaatatctgaagcaggcagtgggcaatacctttgacaaggacaggatgcccaccatctacctgctggccctgacccggtatttttccacgctggacaaggtggatgggggggatgcggaactgttaaagaccatgacctccctgcttttggaggaaggactggtatttccgtataccagagagctgtcaaagcatattccggtgcccgaggacatcatggataaggccatggtggaataccggggaaggaaggacgcccacccggagcttcaggtgagaattctgcccgaggaaacaggatttcacagcgaggacatccgccgcgtttaccaggggatttttgtgaaacaaaaggtactctttgagggagaaatcatggagtaccggatatatgactatctggacggacaccgcaggcttgcggcagagggacaggtggagtgcgaccataagctggagggaaaggagaacagccgttttgcctgcctgaacgagatgggagcagcaatcaaagacagggatgacagcaggcttttaaacgcgatggaagattatctcaagaagtcggcggcgcttggcaggctgtttcccatggagtaatggaggaactgtctatggacggtctagtgattggtctggatttaaatgacgactatacccagatatgctgttatgataaagaaaagtcgtggaccattcctacggtcatctgccggaggaaggaagaggaagtctggctctcaggggaagaagcctatgcggccaccctgctgggagagggagttatcgtggataaacttcttaagatggcggccaaggatggaacatccaccatcggaggcatctgctacggcggaggtacgctgcttaagctgttcatagagaagatgttaggatatcccaggaaggaattcggtacagatgaggtggcgcagctggtcatcaccctccagagcgtggactgcaggctgcttgacacccttatgtactgtgccgactatctggagataccaagggacagggtccatgtaatcagccataccgagggtttcatatactatgttctgagccagaaaaaagagctgtggaccaatcaggtggggctgtttgagctgtccggcgaacgcctgtgctattatgaaatgaaggtgcagaggggcatgcggcgcaatatggtccaggcagaggcccagaaccaggaggaggcctttaatctggacatcctggattcgccttccggcagccggctggcagataagatactgacggcctgcggtgagaagcttttaaacaggaagctgttttccacggtgttcctgaccgggaagggatttgagcgccaggactgggccggcggatttatgcggttaatctgcaaccggagaaaggtgtttgtggagccctgtctctttgccaggggggcagctttcaagggggctgattatacccatcaggagacttcctatccctatgtatttatctgtgagggaaggcttaaggcggaggtgtccttaaaggtcatgcgcaggggaagggagaaccagctggtggtggcttcctacggcgacaactggtatgaatccaaaagctccatggatctgatcgtggacggacagaaggagattgagtttatcatcagtccgctggactccaagaagaaaaagctggtcaggattccgctggccggatttccggaacgccctccaaagaccaccaggatagagcttaaggtggcatttactgatgaagggaccatgacaatgtctatccgcgacaagggattcggggagctgttcccatcctccggcgcggtggtgaaacaagaggtgaatttatgagcctgatactttgcaggcaggaacctgtgaaacatccgtattatattgatgtgctgggaatccatatccattcctcccaggagctgtgttatatcgtatacaaccacccggttctggtgatggatgattttctggatgacctgctggttgattttatccgtaaggatttggacatggattatctggcagggcggatggagaagctggtggaaaccggcaccagaccagaggaggttctggcccttttcctgtcggaatgcgactattacagcgacaaggaaatacagaaattcaagcagaccacagcagctctgcgggccctgcatccggcccagtatgaaaagcagagggcggattacatgtttgggcagcagcagtatggcaaagcagcggccaggtacagtaaaattctggaataccccagggacaaggtggtggaggacctgtttctggcaaaggtctacaacaacctgggagcctgttatgccatgatgttccagtttcacaaggctctgggatgctatgacaaggcctatgagctgggaaaggatgatgcgctgttaaaacgcatttattttctcactgtctttgcgccggagctggatgtgaaggacaagtaccagtccgtgttcacggatgagcgcaagagaacgtggagcggggagatggacctggccgcgctggaggcaggacaggcagaggaagtcagggccctcagggcattatttaaaaaggatcccatcaaacggatgagcggcgcggctgagatggtgcgcaggtggaagcaggagtaccggatgatggtctgagtatatatggtgcgaaacggtttggagattaagaatacgataatgacggaggtattacatcatggcgtttgacatagcaaaggaacatctgagaaaggccggcctggaggatcggatttatgagtttgaggtatccagcgccacggtggagctggcagcccaggcagtggggtgtgagccggcccgcatcgccaagacgttatcttttatggcggaccagaaggctgtgctcatagtggccgcaggggatgccaaggtggacaaccataaatataaggagcagtttcatacaaaggccaaaatgctgtcgccggacgaggtgacagagctggtgggccacagtgtgggaggcgtgtgcccctttggagtgaaggaaggggtggcggtgtatctggacgaatcccttaaacggttcgatgtggtgtacccggcctgcggcagcgccagcagcgcagtaaagcttacgatacctgagctggagacagcttccgggtatcttgggtggattgatgtctgtaaagggtggggggaagatagtatataattatagtttgattggaaagctgattctggttatctggaatcggctttttcttttatttcatccatggtataccaggagatgcttccggcaattgactttttaccattatatattataaaaaacctggttttgtaaaataataaaaaaaacggaggtatcaatggatatggcatatacggtggagcaatttctggattttctgaaagaagaagaaaagtctgatgcgacaatcagtaaatacacctacgaattgcagatgttcctgcaatttttaggaaaaagggagattggaaaggagctgatgattcagtaccgcacctatctcagcagtaggtaccgcccacagacggtcaacggcaagctgtcggcagtgaacgcgtttcttaagtttacagggctgtatgagtacagggtaaaatttctgaaggtccagagaagggcctatattgatgaaacgcgggaactgacgcagaaggagtatgaacgtcttatggagacagccggaaggcagggaaaatatcagctctactatctcatgatgacaatatgcagcacgggcataagggtgagcgaattaaggtatgtgacagtggaagctgttatgagaggaaaggcggaaatctttatgaagggaaagtacagaattgtaatttttccaaagaacctggcagcccagctgaaggcttttgccaggaagaacggcatacgaagcggcagcttgttctgtaccaggagcggacgacctctggacagaagcaatatctgccatgccatgaaaaagctttgcgcaaaggcaggagtaaaaaaggataaggtatttccgcataatttccgacacctgtttgccagaagtttttatgcggcggagaagaatatggcccatctggcagacatattgggacattcttccattgaaaccacgcgtatttatgtggctgccagtataaaagagcatgaaagaattcttaataaactgaaaattggggtaatcaacaaattaccacagaataaacattctgtggtatataattcgcttgtatttacttgcaggtctaaaaactctatacagtatatctaaaaaaacagtaatagtcaatatacatattcatgtttttcttcaaagcacataagccggaaacaaaaaacagggttttccggcgtctttgggtatccatatttcgtttttcattcaaggttacggattcaaaaaagtaa

SEQ ID NO: 3134 - DNA, 128901 bp, Unknown
  gut microbiota DNA sequence
tttcatttttttatttcttattctcttgcgcttttggtactcaccgcagcgcaagagatatcttaccagatgtttcgacaaatgtcaacaataatttacaactttttttacacacctcttttacacacttttttacacaatacagcccatgcattcgcacgggctgtatcaatcaacttcatggttttatcggcagcggtatagcacttacagactgtgcctgttacagttatataacagttatataacagttatataacagttatatatctgaaggtatcccttctgccggaattccgtcaaccggaatttcatcggatgatgattcgctctcctcttcaaccacctccggcgcaacctggaactcggacaggtatgcttcctcaggaagcccggccatatacgccggcaggttgatggcaatgccgtccatatgatgcggcagggaaacggtcacatcgaccatctcttcgcttccgcctttttcctgagtaatttccagagtcattttaaaggtctggccaatacaggtagccatgcctctctccttatcccggagttttgctacctgttcaccgtccacatacaccactaccttataaggtgtggtataggtctgaccattataatcaatggacttattatctatatacaccgtatgtccgcggccaatgaccatcataatacctgcgataatgagcaggagtaggattgctcctattctgaatagaatggtacgtttcgctctcaattctccccctcctcactctgtgcaagctgcagcatctgaccagccttgcccttagctcttcgttttttcgtctcatacatgataagagcaacggtgataacaccataggagatgaatacacggaaatactcaccaatcatggaatcaccggtaatggttgcgcctgctttgggcgccacaatgaacatcaggtggaacaggatgactccaaggaatacgttgccaatggacgccctgtcaacagaggctccgcccacaagcagggctgcgatacagaacataccaatctgtgtatgggaactgtaggtggaaatattgcccatattctgcaggtagataaccatgccaagtccggcgaaaaccgttgacatgataatggcgataatacgggtcctctccaccttgatgcctgcgtcaccggctacatccatatcctggccaacggcacgcatgtcctggcccagctttgtcttgcggaaccatatgataaacaaacacagcagggcaatgataataagggtcagtaccggaatcttgacacctccgatatggatggccagaagattgtccagatactgcctcatatgaagaaggctgaccgtgttgcggacaccataacctcttggcagcttaatggaggaatggataatcggaataatggaacccatcatgtacagaaccaccagctgatacagaccattcatgaagaagctgatgatatagctggtaaccatctccctgcctttggccatgttgagcatcttaccgcagaaaaggcccagcagaatggaaatcggtatggaaatgatcatggcaaggataatgccgggtattccccatatctgccagtcggccacaaagataaggccgatttcacctgccatagcgcccagagtcataccgaagttaagtcccatgccggccataatgggaatcagcaggctcaggatcaggaaggcattcctgcccaatctggtgacaatctcattgagcagataccccggagaaaaaccggatatcggaatgcagacggcgcagataatgataaacatcagcggcacagagttattccgaactagttcgagaatgctattactgccgttatttttctgttttttactcattttgatccctccgtctttctggtcagagcataaagaatcataccattggaaacaacgatacggataacctcgctcatatccatatgaatcatggaattcattaccgttggggtcatggtaacaatgccctggaacaggaacgtacctatgattacattggtaatggatgccttattgactgaagcgcctccaatcaggattgcagacactgccggaagcgccatatagaagggcgccatgtaaagctggataaagccgaaaccctgctcatacatcaggatgcccaccgcggcaagccaggtagacatgatgacggaaagcattctcgtcttatcaatattgatgccggatgccctggcaaaattgggattggagcccactgctgtcatggcagtaccggtcttggtgtgaaggaacgcccacataaggaaggcaagaaaggcaaagaacaggaggctgcctgtaggtatggaaatcttaccgatattaatctgcaggaaattggccaatgccttatcgtaaaaaccctccagtgagattgttgtacgaaggcctttgcctgacaatccccaaaccatggtgggactgctgtatggcagtaaaagccacatcatacacataaaggatacggatgaaaagcccacataagtggcaatcatcatctcgccgcctttaatcttgttgagcagccagccgtagccgccgccaaagatcagcgcaaacggagtagctatcagaatagccatgaaaaagctgacaggtccggtaaagccaaactgaatggacatggtcgcacccagaagaccggagataatgcctaacggaaggccgaaattaagcccgcagcccgaatgcaccatgggcaccattgccagtaccaggacggcattccagctgaaacggttaatcgtgttggttatctgtgtgggaagatccgctccgacgattggcgccagaatgaagagcgccaaaagaaatccggcaatgatcagcctcggcagaccgaagttgtcaatcaattccctgattttcgtcttcttcccaggatttattgtactatcttgtatttttcccatgctgtctccccccttatttaacctggctgaccatgagcataccgaattcttctgaagattcggtcgccggcaggattccagcaatcttaccgcccgaaacaatggcaatacggtcacacgtggtcctcagttcctccagctcagaggaaatcatgacaacggtaactccatgctccttgttgaactgcttaagagcatccagtaccaatgatttcgcgcccacatcaatacctctcgtaggctcggatacaaacaggaatttaggttcaagtgcaaaggcctttgccagacacactttctgctggtttccaccggaaagctcctttgccttttgcttggagctggtgcattttatctttagctcgtctatgtatttttgggtcacttcgtggattgccttttcatctctccaggtaatcattcctccaaggtatttcttgaggaatttatcatgaatctgcatggctgaaaatgcaatattccactcaagggtttcatcgagaaggagtcccacgtcccttctgtcctcagaaacaaaggccagagaggcgtccagacattttcttgggttgttaagaggaatgggcttgccgtcaaattccactttgccgcccgcctcgcacagccccatgattccgtttggaatgcccagctttccctgaccggccagtccgcctataccaagaatctcgccttccttgatatcaagatctacattgcgcactgtctcacctgacatatccacccagagattgcggatagacatgatattctttgcatccggattaatccggatatccgccctggccgtggtctggatatttcttcccaccatccactttgtaatatccgcaacatccgtttcctttgcaggcacgtcctttacaacgtagccgtcccgcatgataaccaccttgtcacagactgtcagaatctcatgaagccggtgtgtaatgaaaatcacggcaatgcctttggcagccatgccgcggatggaatccagcagtgcctctgcctctttttccgtcagaacagccgtcggctcatccagtatcagcagtttcagattatccttgctgagctctctcgcgatctcagtaaactgcttatgacccacgggcatatcgctgataaccattttggcgtcaatcttaacgcccatcttatcaatagcctgctcagaacgttcggccatctccttataatcaagggtatctaatctgtcaccgaaaatttccgagattatattctttttctttggttcacggttgagcagtatattatctgttgccgtgaatcccggtattaatgaaaattcctgatgcaccatgccgattccggcctccaatgcatcaaagggtgttgagaagctgaccttctcgccattaatcaggacgtctccgccatatccgccggtttccctaatcacatccattccaaaaaggagtttcatcaatgtacttttaccggcaccattttcaccgacaagacccagtacctcgccggcattcagtgtaaagttaatatcagtcaagacctgattgccaaaaaaatccttcttgatattgcgcatctccaataagggagtgttgttattcatcatattatgcccacctaacacaacaggggggagagaaacccctccccactgttctccgtacttatttttattagtaagtgtcttacttgatggtgaagtatttctctggaacctcaatcttagtagaacccatgaaatgtcctggatcgcccatgatataggtatcctgatataccaggaacacattgtctaacttaacgccggtttccacattggtgtaattggaaccattccactcagccttaggagagaatacctggtatgcctttgcaatatcatcaatgtcatcaagctcactctcgccattgaggacgttcagtgcatgctgtgcaaggccggcagatgtggtatatccataggaatatgcccatgtaccgaagtggtcagctccgcctttttcaacgatagtggactcaacctttgcaagaatcttatcaaaatcaccagcttcagcagtcagatcgataccaagagcgcctggataacccatcagcggtgaaggaagatctgcttcgatgaagtagccgccgtattccataagctgctttaacagcggctctgtatgggcgtcatttgtacagaagtaagcggcgttctcgccgtacttctcaacccactccggaaccttctcaagtatgtacgcctgagcaccggcaacacctacgtcagaggttggatccggagctgtctcaagtacgaattccatgccgaattccttgcaggcttccttcataacagccacacggcggctcatagtctcataagccatgtgacgcgggaaggaaatatgtacaaacgtatcacagcccagttcatgagcggtacggatgatcaggtagccacgggcaacgaagtcgttgttgcagaccaggtcagctgcgctgccaatctcaggaagatcctcatgtccctcgccggcaatacagagaatgtcagggcgggtctctttgatcttacggaaagcctcggttgtgcctggaacagactggttcatgatgattgctttcatcttaggatcatcagaaaggttgacaatggtctggatggtggtctctaactcctccgtgaagttgtccggataaatagccagcttaaccatgtcctcgccgtacatagcctggaacgcctcagcgccacgcctgtcatcctcggactgggatacggaaccggttacgataccaatgtggaaatcgctggctccctctgtgtcagatgcctcagaatcctctttttcatcctcttttttggcatcatcctttgcctcttccttctgagcctcggtagcctgggtatcagctgccgctgcgctcgtacctgtgccagaagaactgccacagccagcaagccctgtcaccatggctgctgcaagcataacgcctattaacttttttctcatacttacctccaaaattttttttacaaggggacaacagttactttttaattgtagcatatgctcatattttgtcaatagttataaaatccattttggcggcggtccaaatttatgcacatttccaaattgtcaaaaagaactgtaaaatactgtattttaagccatttttataccccgctgtccactgtaaaccagaactccacccccccgtccacattttcaacaccgcaggatttgttgtgtgaatccatgattgccttgacaatggaaagtccgatgccgctgcctccgtattccctggtccttgccttatccactttgtagaacttggtccaaagattatccagatcctcctcgggtatatgctgccctgtgttaaataccgtgatgcgtacctggtccccttccctgaatatgctgatagtaatttgccgctccccgtccaggtgattcatggcattgttcaggtagttggtgatgacctcctctatcttaaactcatccgcccacacccatacaggctccttctgttcaaatacaacccgggcctccttttgctgcagcagaatgccggctgatgccaggatgccgcggatcagggctgtgatatcaaaccgttccatcacaggcatgtcgttgccgaattccagggcggtcagggtcaggagctgcttcaccatcttattcatctttccggcttcgtccatgatgacctcacagtagtaattccggctgtcctcatcctccgccatgccctcagtcagcccctctgcatatccctgtatcagggcaatgggggtcttaagctcatgggacacattggcaataaactccttgcgggtttcatcaatttttatcttttcctcaatgtccttttgcagctcgttattggctgtcttaagctcaccaatggtatccttaagccgttccgacaatgtattcatgctgtggcccagaactccaatctcatcctccgaatcccctgtgtagcgcgcctcaaaatccagctccgacattcgggcggacagcgctgcaagggaacgtatgggcgacaccacctttttggttgcatagtacatgagggcgcttcccagcacaagggcagcaagtcccacataagccaggaactcattggatatgcttacgctgtcgtgaatgctggccaggggcatggacatgataaacatggttctgttatcgtcaaaaaaaccccagctctggaggtaatatccctgtgaccgtctgtcatatatcttctgcacctgatggtcgtcctgggatatcagggtctccgtcctggggtcgatgattcctaatatatagcggtggagagcatctgccaggaattttccgtcctttgccagcggaatcagctctccggtaatgctgtcctgaatcacgatggtcgtattatatttgtcgttcatgagccgcaagagacggctggcttctgtctgctccccgtcgtttgagtacaggctctgcaaatcttccgtgatattctcgcccaggaactccttgtccacagcaatggcattcagattttcataggcattttccaaaagctgcagcttttgtttggtatagaagctctccagaaaaaagctgttcaccgcccacatgctgaccagcactgctgccatcagaccaatgaatatcatggtgaattttactcttatggaatgcttcatccttcgctcacctcaaatttatagcccatgccccatatggtcttgatatattctcctttttcccccattttgctgcgcagcttctttacatgggtgtctatggtacgggcatctccaaagtagtcataattccacacattattcagaatcttttccctggaaagggcgattccctgattttccacaaagtaggtgagaagctcaaactccttaaagctcagatcaatctcctgtccgtcaatggtgacctgatgggccgccttatcaatgcagattcctcccacattcacgctgtccgtagaggccacattggtcctcctaagaatggcctccacccgtgccaccagaatcttggggctgaagggctttgatatatactcgtccactcccagggaaaagccctggagctcgtcacgctcctcgcttctggctgtcagcatgataaccggtacctgggaatatttgcggatggtcctcagaacttcccagccgtccattttcggcatcattacatccagaagaaccagtgcaatgtccttttgcgcaaagaatacgtccactgcctcctcgccgtcgcctgcctctatgactgcaaaccctttattggtgagaaaatcctttaccagctttctcattctggcttcgtcgtccactactaatatcttaagtgtatccatgatactgcctccttacatataatctggccttttttcattcttttatagaaattattttaacaaaaatcaaggaatatttccatcatttcacacaagtttcacaactaaggggcagctgttcagacggcgggagaattctcgcagaaacagcaccgtcgaaacgtttcaccggagaataaaggaaaagctccgggatttctcccggagccattcacctgtatcttaattatccagattattcttcctcgtcctcaccaaccagctcgtcgtattcctgggcatccagaagttcgtcaaatgcttcagccacgatttcgtactcatcgtcatcctcgatattgtccaggttaggggttccgtcctcagtctcgctatagcggtacagatatacctcgccttcctctgagtcagcgccctccataggcagaagggcaatgtattcgtgctctcccgcgttaaaaacggtcagcaccacgcactccacttctgtatcatcatccagagtaagggtcactgtcatctcctgctcttcttcattcagctctttctcatctgccatatcctgattcctctcttatttccttaaatttaggcttgtttcttttctcttacactctatcagactcaccctgaaaatgcaagaacatattctctaatattcgattccttcccttgctccgattcccctctcgtagggatggcgcctcataaccatctctgtgatatagtccgcctgctcctgcagggcctctgagggacagcgccctgtgaggatgacctccagggaagccggtttttctttaagggcctttatcagcccggactcgtccacaaaccccagattgcaggctccaatggcttcatccagcaccagcatgtcatatggttcctccccgcccgcccccagggccatgttccaggccgtcagtagacagtggtcataatacagtgcagctgccttccgctgggactgggtcatgttccaggaaaaaccgaagttctggtcgcagggcagcactgtaatgccgggtatatggaccaggccattgacctcccccgaatcatccgtcttaagcagcctggccaccagtacccggtatccccgtccggcagcccgcacagccgcacctatagctgccgtggtctttccctttccatctccgcaatagatctggaccagccccgtttcattcatccctctgcctcctctgcaaaccttgatattgcctgtttcttgcggtaccgctccttcacatggtaaatatggagcctctcctttgcccttgtcatagccacatagaacattctgcgttcttcctccacatccggatccagaaccgccttgtgatggggcgtgacgccttcattggcatccaggatatagaccacccggaattccagtcccttggcgctgtgcatggtcataaggctgacgccctggcgctgcgcatccctgtctgccgcctgtttcttaagctgttccttgtattcctccatatggataaaccagtgttcatacgtcttaaagccggctgcgctctcctgaagctggtccagtacctcaaagagttcctccggcttcatccttctggactgggcatattcccggatatactcatcgtactccactgccttccggatataattgacagctgcagccggagccatgttccttaacatcgccaaatcatattccagctgctcaatccggtccatcatccagttcttatcctggtaaaaggatttcaccgactcccagctgacctgctggccctccagggcatcccggctgacgtagcgcttgggacggttgatgatttgaagcacattggaacggctcagatctcctaatgcggcccggatataggagattacatttccggctatccagtgctcatacagatttggcaccgcatccctcatgtaaaaaggtatgttgtattccatgagcttggaaatcagcagccgcggccccacgttggtccggtagagcaccgccatgtcattgtaggagatacccatggaggcatagtcacgtatttccgtgacgattcccagagtttcgtccataggttcctgccatgcctttatgatgaccggatgtccgttccctcttgccgccttgatctcctttggaaaacgggtcctgttgtgtgagataacccgccccgcagcctccacaatctggcggctgcaccggtaattggtgtccaggagaatcttttttgcatcgggataatcccgctcaaagcccagcatcagctccggctttgccccgcggaaccggtaaatggactggtcgtcatccccgacgatgaacaggttgtttccgggaagagccagcattttcacaatctcatactgaatccggtttatatcctggaactcatcaattaatatgtacctgtatttgtcctgccatgcagacagtatatcttttctttccttaaacagctcatagcacatcaccagcatgtcgtcaaaatccagcagccggttctgtctcagccgtgcttcatagccccggtacagctgtctgaacatatcctcagaacagttttttgcataataatggtccatgtccatgagttcgcccttcaccatgctgatttcactgagcacagaggatatgaactccccttcatcctcaacttccaaatcgcattttaccagcatttccttcatgtactgaatgcgctgttcttcccttacaatgtctgcggccttataccggtaagccagtttgagaatcagaaaaaagacagaatgaaaggtcccgaaggaaacccggctgcatcctgcctgtgcaatctgttcatagcgctccttcatttccctggccgctgccctggtaaatgtgattaccagaatatgggagggatccacgcctgctttttccgtaagataacggacccggttggtgatgactgtcgtcttgccggaaccgggtcctgccaaaaccagcataggaccttccctgtgccggattgccgttttttgtgcgtcgttaaatgccatttactagattcctatgcctcaagcatctgtatccctttgcggattctggccagggactcttctttgcccagaacttccatgatttccgtggctccggccggcgtcatctgcttacctgaaacagcggtgcggatgggccacatcacaaagccggtcttaaccccagtgtcctccacatattttgaaaggacaccgtaaagggcatcgttggtaaaatcatcctgtgcttccaaaagaggcagcacatccgttaaaaccttaagtgaagtctctgcattggttttcatcttcttatgggtgtacatggccgtatcgtattccggaagggcctcaaagaaatccacatggtccgcaatgtcggggaacacttcaatccttgtcttgaccatggcagctatcttcctgagatccaaatccctgctgacagctgccttcagatatggctcagccatcccgtagaaggtatcaaaatccattgccttcatatattcgccgttcatccacttaagctttgtcatatcaaacacagcaggggatttgctcatgcggtggtaatcaaattcctttaccatctcctccagggagaatatttcccgattgtcctccggtgaccagcccaaaagagccacgtagttcaccacggcctgggagataaagccctgctccaaaaggtcctcaaaggaggaatgtccgcttctcttgctcagcttatgatggctctcatctgtaatcagcggacagtgtacatagaccggcacatcccacccgaaggcggcataaagcctgttgtacttgggtgatgaggacagatattcatttccccttaccacatgggtaattcccatcaggtggtcgtccaccacatttgcgaaattataggtggggtatccgtctgacttgatgaggaccatatcatccagctcggagttgtccaccgtgatatccccgtaaatctcgtcctggaacgtggtggttcccgtggcgggattgttctggcggatgacatagggcatacctgctgccaggttggcttccacctcttctttggataaatggagacagtgcttgtcatatgtcatgatttcctctccatttacagttgtcttaagggaagccagacgctccggtgtacagaagcagtaataagcctctcctttttccaccagcttttttgcgtattccaggtaaatgccggatgcctggcgctcactctggacataggggccgcatccgccgtccttgtcaggtccttcgtcatgaatcaggcccgtgtccttcagggtctggtatatgatctccactgccccttccacgaaacgttcctggtctgtatcttcaatacggagaaggaaatcccctccctcatgctttgctatgagataggcatacaatgccgtccttaaatttcccacatgcatcctgcctgtggggctgggtgcataccttgtccttactctgctcatgttaaagtctcctatattcttctcaatctgataactcaaaaaccattatataccgaaggttgaaaaaagacaatgcctgttttcacaggcactgtccctttcttcttacctatttgaaggttgcgttgtttacctcatcagagaacttgcttaagtcctgaggcatccaggcaatcttttccttgccgcttacatccaccttgactctctggcacttgatggtcagctcagtcatctcttctgatggctccatctcgccaatctttgtcatatactgctttacagcatcctgcatcagcttctgaagggcatcctcatcaccggccatgatagctgctgctgtgtcttcgtcgatgttgttctgcatatcggtcataacgtctaccatgatattctgcatatcggtcatggaatagctcttaaccttcagaagtacggtggtctcgtccttgctctggtctgtgatctcggtgctgtaatccagcttgtcaatcagtccctgaagggcattggacatttcctctacctcttcgtcagagaactcaatgcctgcagcctcaaattctgacttgaacatggaaaccaggtctgtctcagcggaatcatccatcagggcggtctttacatcttcctcagaagcaaatcccagcaaatccttcataggagtcgcattttccttaacagacagctcatacagtgctcccactacctggtctgccggttccagcttctgctggcatcctgtcagtgcaatgctgcacacagccataacggttgcggccaataccgcaaaatttctcttcatgtttctcataaacttatctcctctttaattctgccctctaccgggcaatttatttttcctctgtcctggcagcagtcttattctctgccaagtcgcttggtctcatggtcaggttgattctgcccatcttatcgacctcagttacctttacagtaacctcatcgccgatattcacaacatcctccaccttgccaacgcgcttatcagacagcttggaaatatgaatcataccatccttattgggggccagctctacaaatgcgccgaagttcatgatacgcaccactttgccgttaaatatcatgcccgcctcaatatctgtaacgattccggtaataatctggatggccttatcaatcatagcctcgtccgtgccgcatacatttacagcaccgtcgtccgtaatgtcaatcttaacaccggtctcctcaataatcttgttgataaccttgccctgctttcctaccacatcgccaatcttctgcggatcgatggtaatctgcttaatcttcggggcatatgggcttaaatgcttccttggctctgagatgacaggcctcattacattgtccagaatatacattctggcttctctggtcctggcaatagcttcctcgataataggccgtgtcagtccatgaatcttaatatccatctggatggcagtaataccattcttggttccgcccaccttaaaatccatatcgccaaaaaaatcttccaggccctggatgtctgtaagcaccagataatcgtcatccgtatccccggtcacaagaccgcaggaaataccagccaccatttccttaagaggcacaccggcagccatcagtgaaagggtggacgcgcagatgcttgcctgagaggtggaaccgttggattccatggtctcagatacggtacggattgcatatgggaattcctccgcgcttggcagaaccggaatcaatgccctctccgccagggcgccatggcctatctcgcggcggccgggtcctctgcttggctttgtctcgcctacagagaaggatgggaagttatagtgatgcatataacgcttgctggtctcattctcatccaggccgtctaatttctgagcctcggacagaggagccagggtgcaggcgttgagtatctgtgtctgtccgcgggtaaacatacctgaaccatgaactctcggaagcaggtcaacctctgcggccaggtggcggatttctgtgatggcgcggccgtcaggacgcttgtgatcctttaagatcatcttgcggaccgtcttcttctggtactggtaaacagcctcgcccaggacggcaagccattcctcgttgccggcaaatgcctcttccagctttgctgtgatctctgctatattcttctcgcgggtctgcttgtcatcggtaaacacagcctcttccatttcctgaggagtcacgatttccctgatggcggcaaacagctcttccggcactgcgcagctctcgtaagtgtgcttttccttaccgcactcagccacgatggtgtcgatgaacttgataatttcctggtttacttcatgagccctaaagatggcgtcaatcataatctgctccggcacctcattggctccggcctcaatcatgataaccttttccctggtggaagcaacggtcagtgccatgtcagatacctgcttctggtcagcagtggggttgataataaactcaccgtcaatcagacccacctgcgtggtggcacagggacctgcaaacggaatatcggaaatgctggttgcaatggcagaacccagcatggctgtcagctcagggctgcagttggggtccacacacattacgatgttgtcaagggtcacgtcgttgcggtaatccttagggaacagcggccgcatggggcggtcgataacgcggcaggtcaggacagcgttctcagaagccttgccttccctcttattaaaaccgcctggtatctttcctactgaatataatttttcctcatattccacactgagcgggaagaaatcaatgccttcccttggcttggatgacgcggttgccgtggaaagcaccaccgtatcgccatagtgcatgaatgcagcaccgcttgcctgggcagccacacggccaacctcaacagtcagcttgcgtcctgccaaatccatactaaaacttttaaacatactggtatctcctttacaataaaaaaataataaatgttaccggtatggttggggcatgtccgatttcattggcatcccccggggcagaagacgccgaaactactgatctgcctgcagaatccccaatcctgcaggtacatcagcggtctcggagtgatacctctgccgcccacaccgcttcttcctctccatgataagcaaatatagggtggagttccctccaccctaatcttcagaattactttctgataccaagcttctcgattaatgcacgatatccttccaggtctgtcttctttaagtaatcaagaagacctcttctctgtccaaccatcatcagaagacctcttctggagtgatgatcctttggattctgcttcagatgttcggtcagttctgtgattctctctgtcagaatggcaatctgaacctcaggtgaacctgtgtcccctggcttacggccatactctgcgataatctgtgctttcttttcctttgaaatcatggtgtttcctccttaatattattcatctcaccaaaaaccaggctgccggctggagtcaccaggtaaccgggcatcggcgttatttcataccgacttagtatagcataaatgggtggggttgtaaagtgcgaaaaaataaatttggcgggagtaaatttagcatgagggcgtctcccgtctcacccctgtgcaatcatctccggatggttttcataatatgcattggcaaactctttatccttctcaatccgctccttcagttcctcaaaggaggtgaatttttgttccgggcggtcgaaggccaggagctggacttctatatttttaccgtagatgtcgccttccaggccaaagatataggtctccacgcctgcggggtattctcctcctaccgtgggctttttgccgatattggtgacgcctttatagtagacgccgtccaccagcacccgtgatacgtaaacgccgtatctgggcaggcgcttaatgggaggcggaaggatattggctgtggggaagcccaacaggctgcctccgatgtggttgccgtgcactacttccccgtggatggcatagggctggcccagcagctggttggccttttccacattgcctttttccagctcttcacggatataggtgctgctgatgtcacgcctgtggtccttttccttttctatgacatggagatggtaacccaggtcacgggccatggcagagagcagctctgcactgcccgcgcccttgtagccaaagctgcagtccgggcctaccacgatttccctggcatgcatgcggcctgccagaatgtcctttacaaaggcttccggctccatatggcgtgtttcctcggtaaaggggtattccaccagataatcaatccccaccttctccatgttggcccggcgctccaggttggtggtgatgacggtctggggctttcccgtgactgctgttcccggagccgtgccaaaggtgaaaatggctgtgggatacccagttgcttccttcagctccatcatggttctcagtaacttctggtggcctctgtgcctgccgtcaaacttacccaaagtcacgatggtgggctcctctatctgaaattctgtggtgtctgcaatatacctcatcctgtcacttcctcgttttttcctctgttccagatgttccggcagcgctgcgcgggcagctacataaggaacatcttccagggcttccaccagtgcctgtccttctggtactggtatacccctgtgaatctatgattactgtcatacatacggaacatctgtccgtcctcagccccggccttccactggtctgactgactccagtccagatgtcttgcaaagcagggatttccgttgtgtaaaagggaatctgcttccggcagacatccaagaggcggataggactgcagggcttcctccaccgggaggatgcagctctccacagctgcctggtcacggagctgttccagctggtccagtgtaaggctgtcctcaatgctgaaacggtccaccctggtacgtgtgagatgctccatacagcccccgcatcccaaaagccttcctatatcatggcacagggtacgtatgtaggtgcctttggaacaggtgacctccatccagaccctgggcagttctatcctgcttacctttatgtccagaatctgcaccgcccttggccggcgttccacttcctttcccgcccttgccagctcatacagcttctttccgtccaccttaagcgcggagtacatgggaggtatctgggcataatcgcccttaaatcccataacagcttcatttacctgttcctcagcaagggacagcgccccttccctgtcttctgccagaatggttcccgtggtgtcctgggtatctgtctcacagcccagcagcatgacagcctggtacgttttggaccggtccgtcagcatatcgcacagcctggtgcctgcccccagacaaacaggaaggactccttcagctgcggggtccagggttcctgtatggcctatttttttctgctttaaaattcctcgaagccgggctaccacatcgtgggaagtatagcccggctctttgtatacatttatgattccgtgatacatggtatgttccttactcctggctgcctgatgcagcatccagctgcctggcaatgtgtacggacagattgttgattacgtcgtgtatgctgccgctcatagagcatccggcagcccttacatggccaccgccgccgaagaacgcggcaatcctgcttacgtccaccagatactgggagcgcatgctgaccttaaattcctgaggtcctgtctcatagaggaaaatggcaacttccacgccttccgtaaggcgcagctggtcaatgatgccgtccatatccttgccgtcaaccccgtaaaactccatctcgctctggcggatggcgctgaagatgcaccgtccgtcaaaaaaggtgatgctctccaaaagagctctgcccagaatctggttctggatgtatgtttttctgtaaaagctgttgtctatgatggctccgaagtcaattccctttcccatcagcttacccgctatctccatggtgtgggctgaggtacaggaaaatttgaacacgcctgtgtcgtggatgatgccggtatacaggcattccgccgtatagcggtcaagttttccttcgtccagctggtcaaaaaggacctcgcaggtggaactggcctcatccggaaccacgttggtgccgccgtaacgggtattggtcacgtgatggtccaggcacaggcttttgtcagcctggtccaggtaatgtttaaaatcacccagacgctggatatcgccgctgtccaggcagacgcagagctcatagcattcaccgtcaacctggtggcggattgtatcatatcccttcagataactgaatttaggagatgactcctccagatacacggctgcccgtatatctggataattaagccggagatagttataaagtcccagtgtggagcccaggcagtcgccgtccgggcgtatatggcccaggatagcgacggacttggtgtcctctaacatctgttcaagaatcgtcattaaaactcctcctttgctccttcctcatcctgtgtttcttcctgatgaaggtcttttgtcacttcatcaatgagtctggacatgttgacaccatattcaatggactggtccaatatgaacttcagctccggcgtgttgcgcaggtttacccttctggcaagctccctgcgcacgtacccttctgcgctctttaacccctggatggttgactttcccgcctcctcgtccccaagaacgctgatatacgccttgcagaacttaaggtctggtgtaacctccacggaaaccacactggtcatgggatgaatccttggatccttgattcccccgcggatgatctcactgagctcccgctggacctccatgttgattctggtattctttatgctgttcttacgcatgtaactcctctcttagccatgatgcctatctcggtacttccaccatgatgtaagcctcgatctcatcatcttcctgaagatcattaaacttctcaaatacaagaccgcactcgtatcctgccgccacttcctttacatcgtccttgaaacgcttaagagaagccagaggtccttcaaaaatctgctctccctctctcttgacacggcagctgcagtttctctggaacttgccgtccaatacataggaacctgcaatggtgcctatgccggatgccttaaaggtctggcggatcactgcatggccgataaccttttcctcgaatacaggatccagcatgcccttcatggctgcttccacatcctcgatggcctgatagataaccttgtacagacggatatccaccttctcgcgctccgcaatggacttggctgttgcatccggacggatgttgaagccgatgatgattgcgttggacgcggatgccagggaaacatcggattcgttgatggcgcctacgccgccgtgaatcaccttcaccataacctcctcgttggagagcttggtaagactctgctttacagcctccacggagccctgcacgtcagcctttacgataatcggcagttcctttacattaccggcctgaatctggctgaacaggtcatccagagacagttttgcctttgtatcctctatcagtttgctctttccttctgaaataaatgtctcagcaaagtttcttgcttccttctcattttcagtagccacaaatacctcaccggcattcggcacatcgttgaggcccaggatttccactggcgtggatggtcctgcttccttcacgcggcggcccctgtcgtccatcatggcacgaatcttgccgaagcatgcgccggccgcaatggtctctcccactcttaaggtacctttctgtaccagaaccgtggcaacaggtcccttgcccttatccagctctgcctcgatcacaaggcccctgcccttacggttggggttagccttcagttcaaggacgtctgcggtcagaagaaccatctccagcagatccttgataccctcttttgtatgggcggaaacaggtacaaagatggtgctgccgccccaatcctcgggaatcagctcatactcagccagctcctgctttaccttatccacgttggcgcttggcttatcaatcttattgatggccacaatgatttccacattggctgcctttgcgtggttgatggcctcaactgtctgaggcattacaccgtcgtccgcagccactaccaggatggcaatgtccgtggactgtgctcctctcatacgcatggccgtgaatgcctcatgtcccggcgtatccaggaacgtaatcttgcggtcgtttatctcaatgacagacgcaccaatatgctgggtgatgccgcctgcctctcttgcagtcacgttggtctcacggatagcgtccaaaagggaggttttaccgtggtcaacatggcccataacacatacaaccggtgatctgggaaccatgtcctcggtgctctcttcatcttccttcaaaagctccgctatgacatcaacctttacttccctttcacacaggacatcgaattccatggctatctcttccgcctgctcatagtcgatttcctggttcagggttactacctggccctttaaaaacagcttctttacaatgacagacggctgaagcttcatcttctctgccagctccttgatggtgagtacatcgggaagagtaatggttttcacctcatccgccttggactcctccttcttaggctggggcatgataaatgctccctttcctgtcttcggcactttcttcttgccgtcctccaacctgtcgcgcttatcaaatctgtcattcttatgagaattcttgttctggcggttgctggttggctttgtctggattggggtgtcaaaggaagattttccgtctctggctcctgccgggcggcggctgtcattcctgcctctgttatcccttgcatccttgtcatctcccggacggccctgatagccaccctggggtcttgcgccgtagccgccctgaggcctgttgccctggtagccgcctccctggggcctgttgttgtcgcggttaccctggtagcctccctggcctccctgatagccgccctggggcctgttgccctgatagccgcctccctgaggtctgttgtcgcggttaccctggtaacctccctgcccctgatagccgccctggggtctgtttccctggtagccgcctccctggggtctgttgttgtcacggttgccctggtagcctccctggcctccctgatagccgccctgaggtctgttgccctgatagccgcctccctggggcctgttgttgtcgcggttgccctggtagcctccctggcctccctggtagccgccctgaggtctgttgccctgatagccgcctccctggggtctgttgttgtcgcggttgccctggtaacctccctgatagccgccctggcttctgttgttgtcacggttgccctggtagcctccctggcctccctgatagccgccctggccgcggttattatcgcggttgccctggtaacctccctggctcctgttattgtcgcggttgccctggtagcctccctggcctctgttgttgtcacggtttccctggtagcctccctggctgccctgatagcctccctgaccgcggttgttatcgcggttgccctggtaacctccctgaccgcggttgttgtcgcggctgccctggtagcctccctggctcctggctgtatcgcggctgtcctgggcagttccctgggttcctgtatgagcacctgcctggggtgctgcagacggctggggtgctgcggctttctctgaaaccgtatccgcggactgggcctgcacctgaggtttggcagcctctgccggtactgccgatgctgctgcctgcgccggctgcggcgctgccgcgggagcgggtgccgtatggccctggtttgctgtctgggatttcggaggaaccggacgcttaatctgctgctgggcgttctgcgggcggaacacggctgtcagcttcttcttagccggctctcccttggacgcgccgtcctggctcctgacagcctctgccttaggagcctctgttttaggcgcttctgtccttggtgcctctgttcttggagcttctgctctgggggcctctgttttaggagcctccgacctgtgctccggtgcggcaggttttgcatccctcttaggatttgcaaaagagcgcacaatattctcctgatcctttgtcacattcgatgctgcatataatacagctgctttatctttcgtcttaataatttccaatatctccttactggtcttgcccagttcatttgccagttcacttactctcattcaagctacctccgtttatattcattcgttctaccattgactttgcgaaacctgcatcctccactgacagtgacgccctgaactcctgccccatggcatgccccagttcgtcctttgttccaaacagatagattgggactttatagtaagtacacatgttggtaaactttttcttcgtgttgtcagaagcctcttccgatacgattaccaaatgggactttccgctctttactgatttctccgtcgaaaattcgccgctgaccaccttcctggcccttgttgcaaggcccaccaggcttaacagccttttgttatctgccaagttcttccatctccttttccagagtttcatacacctctttgggaatggccatcttgaaggaacgttccagtccctttcccttcactgccttcttcaggcattccattgatggacacaggtaagcgcccctgccgttcttgcggcctgtggcatccaacataatctcatcctcggcggtttttatgactcttatcatttctttcttgctcttcatctcctggcagccgatacactgcctgagcggaacttttttcatgctcacttacatcactcctaaccttctcagagtatcccttttactgttcgcttccgtcttcctgatagttttcttcatattcctggtagctttccggttcctcctgctcttcctcataattctcagaggacgtgtcgccgtactggagtcccatctgctcgaagagccccatttccctggcctgggtttcactcttaatatcaatcttaaagcccgtaagccttgcggccagtctcgcgttctggccctccttgccaatggcaagggacagctggtaatccggcacaataacctgtgcttcccgctcttcctcatccgccacaacgcagataacctttgcagggctcaaagcgttttcaatcaggtacgcaggattgtcgtcccagttaatgatgtcaattttttcaccctttaattcacttacaatggaattaaccctggaaccgttgagacccacgcatgcgcctaccgggtccacattggcgtcattggatttcaccgcaatctttgtcctggagcctgcttccctggcaatggccttgatttccactgtgccgtcgcggacctcggccacctcggattcaaagagacgtttcaccaggtccgggtgtgtcctggacacagaaactcttgggccctttggcgtatcctttacctcgatgacatataccttgacccgctccgtgggacggaatgtctcaccctttacctgctcgctttcattgaggatggcgtccaccctgcccaggttaatgctcacgttccttcccagatagcgctgtaccacgccggtcatgacatccttttccttcatataatactcgttgtacagtgccttgcgttcttcctcgcgtattttctgcagaatcacgttctttgcgttctgtgtggcaatacgtccgaatttcttggaatccagcggaatctgtaccgtatccccaatctcatacttgggattcagcatcttggcatccgccagactcatctccagacaatcgtcctccacgttttccacaaccgctttttctgcatatactgcaaagtcacaggtatttgggttcactgtgacctttacattatcggcttttccgaaatggttcttacaggcagtgagtaaagagttttcaatcgcttcaatgagcgtatctttggagatgttcttctctttctccaatacctccattgcctctaacagttccttgttcatgtttatcctcctatccatgtctcagcatgtgaatgatctaactaaaaatccagcgcaagccgtatcagggcaatgtccgctttttcaaataccatctggcttccgtcttccatggtcagcgtcacagtattttcatcatatgcactgagggcgcccgtaaattccttttgcttgttaagctgacggtaaagccttacatccacatccttgcccatgcttcttacgaagtccctttccttcttaagaggacggcccagtcccggggaactgacttccagaatatagctgtcgtcaataaaatcctctttgtccagccagtcgcttaaggccctgctgatgacctcacagtcatccacggcaatcccgccttctttatctatataagctctcaggtaccaggtacctgcttcttttacatattccacgtctaccagttcaaaaccatgctcttccatcagtggaaggaggtgtttctccacccggctctcatagctctccttttttcccatcgttccaccacctttcctgtctttccaaaacgaaagagtggactggtgtccactcttttatcagtaatttacattagttatcgtatacactataccatcatgccgctgtaaatgcaagcattttcaaggattttatcgaaaatttcgtaacagttcaaagtcccgttacaacttcctgtccgtcctgaatctggaaatcaaatcaaaaagtttcttagcttcctctgaaagttcgcctcctgttgcagcgttctcctccaccatagcggcatttgtctgaaccactcctgatatctgttcgatcccgatgcgcacctgatccagggatttggcctgttccgtggaagcctttgatatgtcctccaccgcctccgcgatctgttgtgcgctggtaaccacctgccccagtgactgtgccgtctcattggcgatcttctgtccgttatcaatggaccggagagactcttcgatcagagatgtggtattcttagccgcctcgccgcttttatttgccaaattccgcacctcatccgccacaacggcaaaacctttccctgcctcaccggcccgcgccgcctccactgccgcgtttaaagccagtatattcgtctggaatgctatgtcttcgatggttttgatgatcttccctatctcgcccgacttattgctgatatcccttactgctttcaccagctcctgcatctgtgtgttgctgagcgcaacccggtggtccatttccgcagagcgcccgctgacctcttcggtgcgcctggcattggaatctacatgagtaaatatttcattgatggtggcggcaagctcttccacggagctggcctgcctggcatttccatccgcaaggctgctggtactgtccgctacctggcccgaactggccgtcacctgttccgctgtgcgaaggatacttcccagagtatcattcagcgtagtccggatccgcatcagagcatccctgattttcgcaaaatctccttcgtactgtagttccagttcaaactgaagattgccgtcagcgatttcatccaggaccctggtggtctcattgatatattcaatatagtccttaagctttgacacggtgcgctccatggcggaggcaacctgcccgatttcatcctttgagtgcacgcccgtctccacattcagttccccatccgcaatccggtgtgcagcatcagcaagttttttcataggacgtgtaatgccgttggagatcagcagaacagccgccgccataaggaccatactgcctgcaaatgtgaccgccgacatgcgcatgaccgtataaaagccctgaagcgcttccgtctccggcatggcggagagtacataccaccccgcgctgtctattctggtaagattcccgtaataccgggttccgtctatttcatatatataatccccggtcaatccgttctgtacagcctgctttacttcatctgagatattgatttctgaaatggatttccccacctgttctgtgtccgggtagcagagaatatttcctgagccgctcatgagcacaagaaatcctgtctgccctaacttcacctcattgatccgctgctgaagggtatccaggttaatatccgtgccggaagccccgtatacttctccgctctgacggtcaatcacaggtgccgccgccgtcacaatagggagtcccgtattaacatcaatgtacggctccgtcataacaggcttctttgtttttgtgcactcaaaccatggtcttgacgtaacgtcccaacctggatcactgataaagccgtccggctgaaaaagctggctggaatcggtatcagccagccagacccccagtatggtagatgaatccagggcctgacgcaccgccatggccgccatcacctcatcatagcggggagctgcgctggcccgttggctgcctctcagttcatgcatgaaatctataaccagagcttcctgggcggactgctcaaccgcttttaaatgtccggtaaagaaagtatccacttcatgggcagcggactcagaatcagatgtcagcttttctctggcctgcaccttggcatatttccccacagacacgctgatcagcactcccgacagcagaaataccatcaatgcaggtaccatgatacctaaaaacattttaatccggattccaattttcataatatttaaccctccttatgtttccgacatctcctgttttggttatatatgcataaaaatcacacattgcagatgttctttgttattatatcgacaatataatgcaaatcataacacctgttacaccaaaaaatgccagaatcggagaggaatgtgaagtattattaaaaaatggtcagacccctcataaaggaatctaaccatagatgtaaaaaaattagtgaaacgtcattgaatgccggactgtaacaaaaattcctttaaacaggacagtccggatgctttcatcaaagcattgcgcgtcctctgcaccaagtctggagcacgctgtaatcatcatccagaaccaccaaatccccgtcgcatccggctgcaatccttccctttctgtgatccacgcccagacatctggccgggttgatggtacatgaattaagggcagcgtcaaagggcaccagagcctgctccaccagaatcttaagtcccctgttcatgttgagggtgctgcccgcaatggtttctgttcccttgagacgggccagtccgtcctcgcctatctcaatgtcatggccgcccagctggtactgtcctcccggagggcagtgcttagccctgagggaatcactgatcatgatggaataatcacgtcccttggctgtaaagaagttgttcagggccgccaggtgggaatggcatccgtcacagattatttccccgtagatatcccttaccctgaaggccgtgcctaccagccccggtttgcggtgatggtaaggcgtcatgccgttatatacatgggtcatggataaagcgccgttggcaattcccagaagagcctgctcgtaagtggctgccgaatgccccatgctgaccaccactccgtgggtggaacagtatctggtaagcgcatggtccggatcccgctccggcgccagagtgatatatttgataaggccttctgccgcctcctgatatttcttaaactgctccacagatgcagacgcaatggcttccggcggctgcgcccccttgtactccatgtccaggaacggtccctcaaaatggatgcccaggatttcagccccttcgtagccttcctttaccacggccgccacattggccacggccctggtgagcacatccggcatctgggtcacggtggtgggcagaatggctgtgacgccctcctcaggaatccgcttcatccagttgcggagcccttccggctggccgtcgtttgtgtcaaaatcatatgctccgtgtgtgtggatatcaatgaaacccggcacgattctcttatccccgtaatcctcgtcagccggtcccgcaccatactcatggatacggctgatgactccatcctcaatctccatctgggctgccatgaactgtcctgctatccagactctcttaccctgaatcctcataatttcttctccttccatattatatgtgttctctatattaattccccttagttataagtatatcacgttagaaatatttttcaatataatttctaaaataaaaaatatttttatttctatgtaacaggcatttagatattctgaaggataaatgagctgtaaaaagcatagaaaggcagggtcctgtatcacataaaatatgattcacaggccctgccttatatcagttaattcctatatcacttcattcttagcatcatttacccttatttcccagcctctggttatgaaccggcctcctgttcaggcgcctttgcccttttccctcacccttcccggctgccgcaaagcagtgccgctatctcaggaaagggttccacgctccgcctcaatattccctgtacatacgcaatggttataccgtagttggttatgggtatcccctggtcgtgggcgcatttcatcctgtatttcatctcacgctcattcagcatgcatccgccgcagtggacaatcagacggaagcctgccaggtcatccggaaactctgtgcctgaggtaaacacaaactccggttctgttccagtatattcccgtatccatccgggcagctttacggtcccgatatcctcgcactgccggtgatgggtgcagccctcacaaatcaggattctgtccccctttccgatgcggtccagagccctgacgccccgcaccatgggctccaggctccctttataacgggcaaagagaatggaaaaggaggtcaggagaatatcctccggcgtatccgcactgacctttgcaaatacctggctgtcggtgatgaccattcttggcttcttacccagagaggccagcgtgtccctcagtccgttttccctgaccaccacggacactgcgtccgcttccaggatgtcacgtatggtctgctgctggggcagaatcaggcgtcccttgggagccgccttgtcaatgggcaccaccagaacagccaggtcagacggtgaaagcaggtctcccacgattttccggctggtttcctgggtcttgcccagatttgccagacactccttaagcgccgtaataccctgaccggtatgggcgctgacagacaggacaggaaccgattcgggaatcccctccggtctcccaccggcagctccgaccacatccgccttgttgcagactgccacgcagggaatctgcttttctcctatcttcttcaggagggtgtaatcctccggagccggcccgtgacaggcatccatcaccagcacagccacatccgtcttgttgagtacctgatagctctttctcaccctcaggcttcccagctggccttcgtcgtcaatgcccggcgtatcaatcatcatcacaggacccagaggcagcagctccatggccttatatacagggtccgtggtagtccccttcacatccgacaccacagccaggtcctggcctgtaaccgcgttcagtacgctggatttgccggcatttctcctcccaaaaaatccaatatgtatccggtccgatgccggcgtattgttcattcccatggttatccgctcctctttccctggttccttgctggtttattgctggttcatttccgattcattaccaattcaataccggtacattacctgtttacttccggttcattgcctgttcacttccggtacattacctgtttacttccggttcattgcctgttcacttccggtttattaccggttcaccgccggtcagttgccggacggatcctctgcttaaaacctgaaatccctgataccctgttcaatctttgccaggttatctctgacaatctgctgcaccttctccttgggtatgcttccaatttccttctctatgagcgcctcaccgatgcgccttgtctcctcggagctgtaatccatcagatattccttcagcgtcataagggcattgggatggcagcagttttgaatctgtccgctcttgcacagggacataaaacggtcgcctgtgcgtccttccctgtagcaggccgtgcagaagctgggaatataccccattcccatgagccagttcaccacctggtccagggtgcggttgtcgctcacatcgaactgggctgaacattcctcctccggctcaggttcaaagtagccgcccacgcttgtcttggaaccgccgctgatttgggaaatacccaggtgcagcacccgttccctggttttctggctttctctggtggatacaatcatgcctgtgtagggaactgcgatgcggatacaggccaccagcttggcaaaggtgtcgtcgtcaattccattgtcaaaggaatccggatcaatgtcatccgccctgcgtatcctgggcacgctgatggtatggggtcccaccccgaacaccgcctccaggtgctccgcgtgcatcagaagtcccgcaaattcataccggtaaagctccaggccaaacagcacgccgcatcccacatcatcaataccgcccagctgtgcacggtccattgcctctgtgtggtaacagtaatcatgcttcggccctgtgggatgaagcttctcatagctttccttgtgatatgtctcctggaacagaatataggtaccgattcccgcgtccttaagcttcctgtaattctccactgtggtggccgctatgttcacgttgacgcggcgtatggctccgtttttatgctttatactgtaaatggtgtcaatggactccagcatgtattcaatgggattgtgcaccgggtcctcccctgtttccagggccaggcgcttatgtcccatatcctgcagcgccataacctccctgcggatttcatcctgtgtcagcttcttccttgggatatgcttgttcttggcgtggtagggacagtacacacacccgttgatgcagtaattggacaggtacagaggcgcaaacagcacgatgcggtttccgtagaaatcctttttaatctgctccgccagctcataaatttcctggttcttgtcctccagtccgcattccagaagcaccatggcctccctgtgggtcaggcccctgcgctctctggcctttgccagaatctcgtcgatcagctccctgttggtgcggtttgcctccccgtaggcaagggtctcctcaatttccccgtgatggatgaattcctccgcatgggatgattttgggtcgtagttcatgttcttcctctccttttcttgccgggtcagggtccgcggccgcttcggcctccggcaacacttccccgtcagatgatttatatagttttatcaactaccgatattggagtacagggccttggagttaatgccctgaagcctgcccagtttgccggacagggcgcttatgatgtcctggggcgcatccaccacaacgcttatgatgttcacctttttctttgcgtagggaagccccatccttccaatgatgtactgactgtattggtggagcagctcgttgacgctttccacagaatccttattttccacgattatgccgatcaccgcgattcttgtctccatacgatacctccgataataaaaaaaggatacgccaaaaaggcgtatcctgaacatactgtcacatctgtgtccccgccttccccttcagccctgcttcgggtcagtcaatcacatatcctgctatgggatgctgccattgctgccgtctctttgctgtaaggcacttgccgcaagacaagcctgtcagcgcagataccggtaccgtgtaccatggcgcacatccgtttttcttatcttactacaggcccgggggactgtcaatcattattccgggaagaatatccgcctgaaccttcaggagactacctggctcccctgatatacggcttgcccaatgcctccggcgcgctgtttttgccgatggcgcccaaaagggcaaccagggttatgatgtagggcagcatggccagagcctgtgtgggcaggggcacaccgatggcctggagacggatctgaagggcgttggcagcgccgaatatgaaggcagcacccatcattccaaagggaacataccggcccagtatgactgcagccagggctatgtaccctctgcctgatgtcatattttcagaaaaattgcccacctgcaccagaaccagatatgctcctcccagtcctcccagcataccgtttaacagcacggccgcccactggtaccggtgtacagggataccggccgaatccgcggccctgggattttccccgatggcggcaaaggccattccctttgatgttctgctgtaaaacagggtgaccaggattaccagcacgtagaccccgtatgtcagcacatcctggttgaacagggcgtttcctatgaggggtatgtcccccagaaagggaatcttaagctttgcaaagggttctatctgctgataagactgaccgcttgacatcagtttatagagaaaactggtgactccggccataaatatattgatggcgattccgctgacggactggtcctgggccagcctgatggacagcagcccgtgaatggcgctgaccatggccccgcccgccatgccgcacaaaaggcccacggccaggctgccggagtaaaaggttcccgcaaaggagaagaaagccccgcccagcatgacgccctccatgcctatattaaggattcccgccttttcagatatggtttcccccagtccggcgtaaatcaggggcaccgccattcttacggaagccgtcagaaaggctgtcacgaaaccaacggtcatgatttgctctaacatggtttttccccctttctcttcctgttaaacagctccctgcccagaatcagcagcacaataagacccaccaggatattgacaatggctgacggcactcccatctgtctctgcatggaattggcccccacctccagggcggcaaacccgatggcggcaaagagcacgcccaccggatgattggacgccagaagggcgataagcaccgctgtgtatccgcactccccggatattccctccagaagctttctctgcacacccataacctccacggctcctgcgattcccgccagaccgccgcttaaaaatgcggaaatgatgatgttcctgacaaccgagattccattacaggcagcagcccgcttgttgaatcccaccaccttgatttcatatcccaccgttgtcttttccaatataaaccagacaaggaacaccatgagcacggcaatgataaagcccgcgtgaagcctggtgggctttaagaaccggtaaagagtgacggaagggtccagcttgggcgactggggtatgcttcccgccgggtccatgagaaaggtcctgactgcaatacccaggaaattgatggcaatataattcagcataatggttacaatgatttccgatatccccagctttgccttaaacatggcggctatgagcgcccagagaccgccaaagacaaatcccattaaaatggcgcacaggatgcggagtcccccgggaaccccggtccaggtaagggccgcccatgcagaggcaagggctcctatgtaaaactgcccctcggctcctatgttgaaaaaaccggtcctgaacgccaccgcgcatcccaggcccgtaaaaatcaggggagttgcctttacaaacacttccataaacccgttcaggtttccaaatatgcctttaaagaacatggcataggcctctgccgggcttgcgtccgacagcatgataagaaccgtccacacagccgctgcaatgagtccgatacccgctatctcaactatctttgatttcctattcatctgccgcctccttagcaataccgcccatcagcaggccaattttatgtacatccgcctcatcccggttcagaatccctatgatacggccttcatacataaccgcaacccggtcgcttactcccaggatttcatccaggtcggctgatatcagcaggacgcatctgcccgcatccctctgcctgagaagggtttcatggacaaaccgggtggcaccgatatccagtccccttgtgggctggctggccacaatcaggccggcttcctcagatatctccctggaaagaataaccttctgctggtttccgccgctcatcagctttaccggtgttttgctgccgcttttgcccgaggtcttgatgctgtattcatccagggcctccctggctctcttctcagcctgtctgtagtccagcaccatgttccgcgaaaatggctgccggtcaaagtcccttaaaatcagattgtcttccactgtcatgtccatgacaaggctgtcgccgtggcggtcgtcggaaatataggagatgccggcccgaaaccgctctttcacactgtccctgcgtatatcctttccctggtattccatctgtccgctgtttatcctgcggattcctgttattacctcagccagttccttctgtccgttgccttccacacctgcgattcccaggatttctcccctgcggattgtaaggcttacgtggtccagggacatcttggtactgtgctttttgtggaggcacacatccttaaggcttaaggcggtgtccccggcagcggattcccttatctccctccccgccttaagctcccgcccaatcatgcaggcggacagttcctccggcgttgtctcctctgtcaccagactgctgacctttcggccatcccgaagcaccgtcacccggtcgctgatatccatgatttcccccagacggtgggtgatgataatgattccatacccctcatcccgcagccgtttcaaaaccccgaagaaattctccgtttcctggggggtgagcacgccggtaggttcgtccagaatcaacaggcttacatcccggtacagggcctttagaatctccaccctctgctgctctcccacggaaagggtgtggacaggcgcttccgggttcactaaaaggccgtaggtcgcggcaaggcctgtcagtttttcccttgccaacttccggtccgccacgattccctgccctttcagacccagcatcacattgtccagcaccgtcattttcttcaccagtgaaaaatgctggtgcaccatgccgattcccctggcaatcgcctcccccggcgacttaaattccacatgttcgcctttaaaacagatttcccctttgtccgcctggtaaatgccaaacaaaatgttcatgagcgtggtcttgccagctccattttcccctaacagcgcatgtatctccccctgctccacagacaggtccacatcctcgttggcatacacgcctgcaaaggatttggttatatgcttcatctcaagtaatggcatctgttccatcctttctttccaaacagggcccgcacccccggacacgctcagctgcgcttggtttgatgcaggcccttttcaggaaatatcttatgctctgggcttggtatcacatggtacttcaaactctccagattcaattgccgcaatcttatcggaaattttctgcttcagctcatcaggaacagcggaatccagattgtggtaaggagcaacgctcactgccccgtctgccattcccagctggtagatgccgccctcaaaggttccgtccgcaaccgtcttaaaggccacctcaatcacatggggaatatggtaaacagaggaggaaaggatggtgtctggtgccaggtcgttctggtcataggaatcgcctgtggcgtagacctttgcttcctttgccgcgttgatggctcctgttccggactcgttggcacagtgtccgattacatccgcgccgttatcaatcatggcctgggctgcctccttgccaagggccgtatcggtaaaagaaccggtccacgcggtctgtacctggatgtcagggtttacttcctttgccccgtcctcaaatccgttcatgattttaacaagggatgcgccctgaatcggtccgataaagcctacctttccgctctcagacatgccggctgccagcattcccatgatgtatccgccttcctcgcacttagacacataggaggccacattgtcggcagaaacctcgccttcggtcacaatgaactttgtatccggatattgctccgcaacgtccactgccggatccccgaactcatatccatggccgatgaccacgtcatatccgctggccgcgtaatccgcaaaggctgcctcaatatcatccggtgtcagattctccgtataggtcacctcacagccgtaatccgcctccagaagcttaagcccgtcataggctgactggcaccagcccatatcattggctgcgccggacaggcacagggccaccttgtatgtcttgccgtccgctgtctgtccctcttttgcctggccgtcatcggcctggtcccctttttcctgggtatctccggtctgggcggaccctgcctgcttatctgccgcctctgtctttgcctctgtctcctttgcctgtccgctgcatccggtcaggccaaagcctgccatggataatgccagggctgctgccgctaaacgcattctgtttttcatgattcttacccttcctttttccttagatttttcatgtttcctcatatgtactgcatcatcagttatatgtatctataacacccggatctgcatggcggtgataaagttttcgttatcactctccacgaactgatccagaatattaaaattgatggcctgagcccccagctcaaggtccggcctggcctctcgcaggcgccggatggtatccggcacgccctcgtatcctcccagatggtatccgcagagaaaatcgccttccgggataatctggattctggactggggtatggtctttggcagctcctcatcatccggatacaggtaggcgccaaagtatttccggtccccctcataaaaggctatggtgggataaaagtaaaaggaattctccctgtacagcagctcctcgtcgccaatggaaataaacttccggtcctcaaaatgcttcaccgcaatctcatccaggcagattccatccatctcctgttccatgaaccggattttcctctggatggcctcatctatgttgagcagctcctgccactgcctgcgaagctcctgggagcgctgcttcatgatatccacagccctgttggagtttaagctggttctggattccttaatttcctccagggaatagcccagacggcgcatataggacaccgtggccagctcgtatatctggtcaaactcatactttctgcgcccgtttttctcattgcgctccctgggagaaaagatgccgacgctgtcatagtagtacagtgtctgtatgttaagcccgaacagctccgccaattccccgatagaaaaatattccttcacctgccagcctcctttcctttttccgccaaattccccgctaaataaaatccctgtaggcactgtgaggttcccggatgacccttgtgcatacagcctctccatccatggccagctttctctcatccacacctttcagaatgccgtctttgtaaacaatgtttccgttaatcatggtcatccacaccggtccggtaagtcccactcttgccagcaggttcttcgggtcgtgaagggccccggccagctccagtgtctcggtgtcaatcataaacaggtccgctgcttttcccgcttccagggttcccaggtcagttcttccaagggtctttgccccgtttaccgtggccacctttagcatatcataggcggaggtgcatccccctctctccttggtgtggtatgcctgcatcagataagccatgcgcagggcatccagcagattggagctgtcattggtggcggaaccgtcgcaccccaggctcaccagaatgcctgcttcctgcatttcctttatattgagaatcgggaagccgcccagcacagccggtgccggacagtgggaaacccctgttcctgtggctgccaggaccttatattcttcctttgtcacttcccagtcatgggcataccatacatcctcaccgataaagtccatctcctcacaccaatccatggtgcgcttgccccagcgggcgatcatgccttcgttctctccctcgcccagatgagtgtgcatcctgactcccttttccctggccatggccacggtctcggcaaaggtgtccctgcggcagttaatgggctggcagggcgccattacgatctgcttcatggaaaaaggcctgggatcgtgatacaatccgatcagccggtcgcagtcctttaagaactcatccgttgtctccagcatattgtcgggaatggagcttccctcacttcttggaagggtgttggtcccccttccggcatggtaccggatgcccaaaagctctgctgcctccatctggcggtccaccggcgacttgccggtcttcctggtgtagcagtattggtggtcaaaggcgcaggtacagccgtgtttaatcaaatccgcaaaggatgtaagggtggagtagtaaatcacatcggaatcaatattctggaatatgcggtaaattttatcaatccagtccatcaccatcatgttgggatagtcaatggttatgagattgcgcacaaaagtctggaaaaaatgatggtgggtgttaatcaggccgggatacacgaactttccctctgcctgtattacctggacctcctcctgcttccattctcttcctgacaccgggtctctttggttcatcaggtccctgccgattgccagtatccttggaccctcaatgagcatgtccgcgtccctgtaaacccggtcttccccgtcgcaggacacgattgccctggcattcttaataagaatctttttgtccattccttacctctctttcggaaatatcatgctgcaaaaaggaccggctttgccagccggtcctttccgcttggctcttgaacctattatatatcctatagttactataggttcaagagcaattttgtctttattataaattgctatattcatattagtaaggcttataaatatacagacctatcacagcccgctttcaatcttctgcctcttgattccatgtttctcggcaaagcctgtaagaatcatggtcagggcaccgtcaccggtcacgttgcaggcggttccgaagctgtcctgaagagcaaagatggtgagcatcagcgctgtccctgtttcgtcaaatcccagtacgcctgtaatcagacccagagaagccataaccgtgcctccgggaacaccgggcgctccgatggcaaacacgcctaaaagtgcgcagaacaaaatcatggtacccagggacggtatggttccgtagagaatcttggaaatggtcattacaaagaatacctctgtcagaacagaaccgcacagatggatgttggcaaacagcggaatgccgaaatccaccatatcatccctcagtggcggctgtgatttcttggcgcagcgcagggccacagccagtgtggccgcggacgacatggtgcctaccgcggtaatataggcgggtccgtaattctttatgacatcaaacggattcttgcctgaatagacgccgccgatggcatacagcagggccagccagatataatggccaatcatgacaatgatgactacctgaaggaacacaggaagctgttttgtaatagtcccctcataggaaagggcgcagaatgtaaatgcgataaacacaggaaggatgggaattaccaccttggtaacaatggacagcacaatctgctggaactcctccagcacctgagtaaccaccgcggccctggtccatgtggcggccaggcccagaagcagtgagaacaccagggcgctcatcacaggcataatttgaggtatatctaactggaacacgattgccggcaaatcctttaatccctccacctcagtggcaatggacaggtggggaatcataaggaaacctgccgtcatagaaaaaagggctgctccgatcgatgaaacataggcaataataattgcaactcccagcattttggatgcattgttgcccagccttgtgatggaaggggcaatgaatccgataatgataagaggcacacagaaaacaatgacctgattcaggatgtatttgattgtcacaacaacatgcataaggccgcttccggccagctggccgactatgatgcccaggataacgcccagaagcaaccgaaacggtaaactgcctgttatttttttcatacttattctccaatcatgatttttatgatttcctcattggtctccttcatcccttcttttccaaggcgaccaacgttcttaagtgtggcctcgacacccttggtgacgatgccgtctcccccgtaaaactgctgaccgcgtatatacatgttgtagcccagaattcccgcgtccactgccgaggcaatcttggctgcacaggaagcctttgccccatcgcagacaatgcccgacacaatggcaagggcgtttacaaccgtatgtacgacttctttaaaaccgccgccgcacaggtaagcaatccctgctccggcgcctgccccggcgctgacagctccgcagtaagcggaaagcctgccgatgggcgttttctgatggatggctgtcaggttggacagagccagggccctgtacttcttatcctcatccaccttaaattcctccgcatataccagcacgggaacagaggcagtgataccctggttgccgcttcccgaattgatgatgaccggcagttcacagccattcatcctggcgtcagaacctgctgctgccatggccttggccctggtgcggacgtcatttccagacatttccagaagaacagagccgatattggcgccgtaatccccttttaacccctcctgggcaatggcccagttgtacttaatctgacggtccagcacttcccggatatcctcaatgtccactgtattgataaaatcccagatatcctccatgttgagcaggcttctgtcggtcagaccttcctcctcctcaccggccacctctacctgcttaagaatctccccattcttttcgatcagcacgatattggtatgataattggcgatgcggaccttggcgtaggaatcccccttatacagagttacgatgatatcaaaggtaatgccgttatccacatgctccaccctgatttccgtgtcatccaggaattccttcatctgtctggtttcatctggcgtaacttctgcaatcacctccagttctttgtccgaatctcccgcaacgattcctgctgctgctgctgccggaatccccttcagatgattcgtgttaggcacgatgactgacttcacattcttgatgatgcttccgctggctcccaccacaacacggtccggcagctctcccagcactttcctggccgtggccgccgcataggcaagggcaatgggctccgtacatcccatggccggaagcagctcctccttcagaatttgaacataagctccgtacttaacatttgttttctccatgatgattgtgattcctttctcattttaattgattatccggaaaattactatacattttgtattgatttctgattagtattaatgtagcataaaaccatatggttgtaaaatttaatgtttttatgatatcgtttaaaaatttttatacaaaatgagcaaaggaagcacataatatggagctacgggagattgccgcctttatccaggtggcgcagttaaagagcttttccaaggcagccaagcagctgggttattcccaggcagccgtcaccatccaaatcaagcagctggagcaggagctgaacgtccatctcttcgaccgcatcggcaaacagaccaccctgacccaccagggagccctgttctatgaacacgctgtctccgtcatgaaggagctggaacatgccagggatgcggtcacccatgtatcggagctaaccggaagcctgtgcctggggaccattgaatccatttgcgccaccatattcccggagcttttaagggaataccaccggctctaccccaaggtcaacgtaaggctcatcaccgactcccccgagacgctgctggagatgatgaacagcaatgccattgatatagtgtatttcctggataagcgtatgtatgacagcaaatggataaaagtcctggaggagccggaggacattgtgttcgtcactgcctccggccatccctttgtgggcagggacagcctggacctggacctggtcatagaccagccctttatcctcaccgagcgaaacgccagctaccgtttcatcctggaccagtatctggcggcccagggcaaggagatacacccctttctggagattggcaacacggaattcatcatcagcctgctgagaaagaacctgggggtttcctttcttccggaattcaccatacaccaggatattatcaacggggagctggccgtcctggatgtcagggatttttacatgagaacctggcgtcagattgtttaccacaaggataaatgggtcaccagggagatggacgcttttctgcgtctggcaacgtagcggccgcggtccctcgccgcgatccctcatgtcccggccgcggtccctcatgaccagccccataaccaaaccgccatgaaaaattcatgctcaacgagcagcaaatcatgctcaaaaagcagcaaaaaagcagcccggcgcgtcagaatttttattctgaaaggagcatatcctccctgccgcacatgggctgctttctttttttctattgtccgttaatgtaattcaccaggccgcctgccgatatgattttctgcatgaagggcgggaaggactggcccttatacgtctctccctttgtcttgttggtgatgattccgctgtcaaaatcgacctccacctcatcccctgcctctatggatctggccgccgacccacactcaatgatgggaaggccgatgttaatggaattccggtagaagatacgggcaaatgtctccgcgataacgcagctcactcccgcgcacttgatggccagaggcgcatgttccctggaagaaccgcagccaaaattcttgttggccacaatgatgtcccccttctggacctgatttacaaattccttgtcaatatcctccatacaatgtttagccagctcgtcgccctgggtggcgtttaaatatctggccgggataatgacatccgtatccacattgtcgccgtatttaaaaacgtgtccgcatgctttcatgttcagtctccttttcctttcacaatgatattgcctttgttccgttaatccagctggcaggggcagatgattttacccgccacggcacttgcggcagccacggccgggctggccagatatacctctgaatccacgtgtcccatacgtcccacaaagttacggtttgttgtggagatacatctctccccggccgcaaggatacccatatagccgcccagacacggaccgcaggtaggcgtgctcaccacggctccggcctcaatgaaaatctccagaagcccttccttcatggcctgaaggtagatggactgggtggccggaatcacgatgcagcgcacaccctttgcaatctttctgccctttaatacctccgccgcgattctcatatcctcaatacggccgttggtacaggaaccgataaccgcctggtccacctttacctctcctacctggtcaatggtcctggtattggagggaagatgggggaaggataccgtgggctttaattcggacaaatcaatcacatatgtctcatcatactccgcgtcctcatccgcctcgtatacggtaaattcacgtttggaatgctccttcatatactccacagccagctcatccacagggaagattccgttctttccgccggcctcaattgccatgttgcagatggtaaagcggtcgtccatggaaagattcctgattccctctcccacaaactccatggatttatacagggctccgtccacaccaatcatacctataatatgtaagattacatccttgccgctgacccacttcgcgggcttgcccaccagctggaatttaatggcggagggcaccttgaaccaggccttgccggtcaccatgccggctgccatatccgtgctccccacgcctgtggaaaacgctcccagggctccgtatgtacatgtgtgggaatccgcgccaatgaccgcgtctccggccaccaccaatcccttttcaggaagaagggcatgctcaattcccatgtcgcccacatcgaaataattggttatctcatggcggcaggcaaactccctgcagcacttgcagttctcagccgactttatatccttgttcgggataaaatggtccataaccagggcaatcttatccttatcaaatacggtctttctgtccatcttcttcatctcgttaatggcaaccggagaagtgatgtcgtttcccagcactaaatccaaatccgcctctataagctgtcccgccttcacttcctcaagtcctgcgtgggcagccaggattttctggctcatggtcattcccataacttatttcctccttcaatatccttctctattaattctttgaaattatttcatccatgctttacattttagcatatgtattgttataataaaaatacataatatgaatgggatatatgaaaaaatgttatatagcaggaggggattccatggaacagaacctgtcccaatacaagatattttatgaagtggccaaagccggcaacatttccaaggcagcaaaggaactttacatcagccagccagccatcagcaaggccatcagcaagctggaggacagccttggcctgtccctgtttacccgaagctcccgcggagtgcagctcacctctgagggtgaaatattatttgaacataccagggaggcatttgacgccctggaccggggcgagcaggaactgaagcggattcaggaattcgacatcggccacttgcggatcggtgtgagcaacacactgtgcaaatatattctgcttccctatcttaagaccttcattgaccagtatccccacatgaaggtcaccatagagagccaggccacggcccagaccctggcccggctggaacagcagaagatcgacctgggcctggttgccgagccttcggtgcgccgtgacctggcctttatcccggtcatggatatccaggacacctttgtcaccacccccaattatctggagaacctgtacctgagggaagggcaggacaccagcctgtttgagaccggaaatatcatgcttcttgacaccagcaacatgacccgccaccatgtggacgaatacatggcggaaaacaacatctttccccatcagattctggaagtgaccaccatggacctgctgattgagtttgccaagattggcctgggtattgcctgcgtcatcaaggagttggtgcagaaggagctggacagcggcatgctggtggagattcctctggatatccccatccaccgcaggaccatcggcttcgcctatcacccggccaaccaggccatggccctaaaaacatttctggagtttttgtactgatattcaggacgtacatattcccgtacatattcccgtacgtatcctgcccattattctgcatatataaaacaggcggattccccggatttttccggggcatccgcctgttctttattcttacctgtatccgccaagatccgcggacacagtctatgtagcattagttattaattagttgttgatcagtttgtccgtatcattccagctgtaaagctttctcagctcagctcccaccttctcaagaggctgctctgcctcgttcttcctcatggcattgaaatgcgggcagccaacctggttctcaagaagccactcttttgcaaaggagccgtcctggatatcggacagaatcttcttcatggccttctttgtctcgtcggttacaatctttggtccggtgatataatcgccgtactcagctgtattggaaatggaataacgcatgcctgcaaaaccgctctcataaatcagatccacaatcagcttcatctcatgcacacactcaaagtatgcattctcaggagcatagcctgcttccaccagggtctcaaatccggccttcatcagggcgcacacgccgccgcagagcactgcctgctcaccaaacaggtcggtctcggtctctactctgaaggtagtctccaggatacctgcccttgcgccgccgattccctgtccataagccagcgccatatccatggccttgcctgtggcatcctggtaaacagcaaccagacatggggttcctctgcccctctgatattcgcttctcacggtatgtcccggtgccttgggagcgatcatggtaacgtccacatccttaggcggaacaatctgtccgaagtggatggcgaagccatgggcaaacatcagcatcattccagggcgcaggtttggcgcgatggactccttatacatggctgcctgcttctcatcgttgatcagaatcatgatgacatctgctttcttggatgcctctgctgctgtatatacctcgaatccctgctcctgtgctttcttccaggaacggctgccctcatacaatcctacgattacattgcatcctgactcctttaagtttaaagcatgtgcatgtccctggctgccgtaaccgatcacagcaatggtcttgccctccagtaatgacaaattacaatcttcctgataataaatctttggcattgcttttttcctccttcaattcctttgaacttaaatcttaaataatatatgtttaaggcaacaaaaccgacgactctctgtccgcctttggccgcccccttaagcctctgttttacggaagcatcctgatatcctctgcgccccgctccaggccagtaaggccggttctggccagctccaggatttcataatcctccagcaggttaataagcgcatccagcttggactggtctcctgtcagcataacggtcagtgaatcctttcccacatccacgatggtggcgcggaagatactggatatggcgctgacagactggcggtcgctggcattggcacgcaccttcaccatcatcagttccctgtatacggaacggtccggctgcagctccttgatatcccttacatcctccagtttattgagctggttctttatctgttccaggacggtctggtctcccagggaaaccacggtcatcctggagtaccgcgggtcagcggtgacacctacagtcagactctcaatattgtatccgcggcggctgaacagccctgctacacgggccagcacacctgcagtattgtccacaagcagcgataacacgattctgtcgtccatctaatcccaccctctcatttgatggcaagcgccaaagcagctgccttcttaatagtaatttcaatcatagcaaccattgttctatttgtcaattgcataataggaatggttattatgagctcaagttatagtgacagaagcaaatcccttaaatccttcaccgtctctgcaatccaggcaggcctgcacgcatccatctcctggcggtccccatatccgtagagtacgcccacgcattccatgccgcactccctggcccccaggacatcgtgctccctgtctcccaccattacacagcgtccgattgtctcatcgtccgactccaggccgcactgttccagcacataccggattacatccgccttgcgcacccgggtttcccccatatcggcaccgccgatgaaatcaaaatactctgccatgtcaaagtgatccagtatcttcttggcaaactcctccggtttggaggttgccactaacagcactcttcctgcttccttcagggcttccagcatttcctttatgccgggatactccttgttctggacccagccccggacgctgaaatactcccggtatgcctgcaccccctcccatgcctgctcatcggaaaagccgtaatacctcttgaagctgtccctcagaggcggcccgatgaaaggtgtcaggctatccagatcatctgtctgtatgccgaaatgctccagtgcatgctgcaccgatttggtgattccctccttagggtctgtcagagttccatccaggtcaaataaaatataatccttacggttcatagtcacttctccttttatatgcagctgtctgctatatctttccatccttaaacgccttcatcatctcatgtcccacgctgatataaggtccgtattccacgatttcatcccgtgtaaaccagccggcctcgcacagctcctcttcctccagacatatggtgtcatccccgtccagctctgccgtaaatcccaccatctccgtatcggaaaatgcccagggctggcttttatagtagcggatattcttcaccctgaggcccacttcctccatgacctccctgcgcacgcagtcctcaaaggtctctccgatttccacaaatccggcaatcagcgcatagtttcggtaagcgcctctggcatagcgggacatgagcagcttgtccccattggtaatggccacgatgacagccggactgattttagggtactccgtctgtccgcaggaaggacagaccagggcgcgctccttcaggctgggttctgtcttcgctccgcagccgccgcagaaccgtctgctctgcatccaccggtagagctggctgcccgttatccccgcaaatgcctggtgcagaggttcaaaattccggaacacagtcagaggctccatatagaatcctccgaattccggcactttcatatccgtcacacagtaataggccctgtcatcaatggaaaacaggtactcggcctgtgccgaaaaatctccttccgcccccagttccccgaaggtgggaatcacactcccccttccgcttttgataagcattaccttattatattcgtagtggagcaggtaatccctgtcttccggcttcttcctcctgaatacagggtcatatgtatgcggcgcaatatcctgaatcatgcatttagcctccgtcctttacggtctgttaatcctaaacgtccagtctgtaaaaatatatttagtgtctattgtatcacaggaacggttcattgtaaaaccttcctttcaaatcggcaatacagcagcaatgcagtaccaaccggcaggcaagcccattgaaaaaggacgcccttaaatccggaacgtccttttcacctctcagtcatgaatcacaacattcaattttttatgaatccccaggctgagaattcccagtatggactttccgtccaccatgcagctgccgcagcacacgtcgatatcttccggctgcttctcgctctgctggacaaaccgctttacatcctccaccgaatcaaacataacttccttagtggtcatatgggcacctcctgtcattttatacagaaagtcttcccatctcagaatggcttatacacgccgaagcgttttttaagcggcttaagcttccagcgtctgagactgctgaaaaagtaataataaatcacaaaggcaaccgtggtcaggctccaggtcaaaggatagcagaaggcagcgccgatgatggtgtggtaatgaggcagaacaaacataatccacagcacccggaccgcgcacacgccgatgcccgtaatgataaggggcatccatgcgtcccccacccccctcagggtaccggatagtatctcaatggcaatataggtaataaaggtaggaaccatgaaatgcagcaaatccatactgatggcctggacctgctggtccgtggtaaacagctccaccagcagatggccgccgttatacaggaccactcccacggacgctgtcagcaccacaccgatcaccatgcaggcaccggctcccttgcgcacgcggtccaggcggccggctccgaagttctgtcccacaaaggtagtggcagatatgccaagggcattgatcatcatccagtagagaccgtccaccttgccgtaggtggcccacgcagtcacattgtcggttcccagggtattgacgccggcctggatgatgacattggatatattatacatgacggactgcattcccgcggggataccgatacgcacaattctctggagcatcctctggtcaatgcgcaccttcttccattccagcttatacatatcatcggttttcataagggccaggaccaccaggactgcgcttaaaagctgggaagtgatggtagccagggcagcgcccgccactcccatccccagcactgccaccagcagcacatccagaatgatgttggtaaaacagctggcaatgaggaaatacaggggccgcctggaatctccgacagcacgcaggattccggcgcccatgttgtagaccaggttgactatgattcccaggaaatagatccggatatacaccaccgcatggcccatgacatcctccggcgttttcatggcctccagggcccagggcgatcccaccagtcccacaatcataaagataatgcccccaataacggaaaaagcaatggatgtatgtacggcccagtggaccttatccgccttcctggcaccgtaaaactgagatatgaccaccgtggcaccgctggacaatcccacaaagaaacccaccagcaggttaatcagggtgctggtgcttcctcctactgcggccagggcctgctttcccacaaagcggcccaccaccatggcatccgccgtattataaagctgctggaaaaatgtcccgaacaatatgggaaagaaaaacagcagcagctgtccgaaaatgcttccttccgtaatacggtttccctttacaacctttccctccatacctgcacctcatgtctgtacattttcgtaaaaaatcataaagaataaaacagcacccaccagttaggtcagctgatgggtactaccttcaattcctatcttatatcatggaccggcttttgtccactggattttattctgcggccttttattccgcagcctcatcttttgaggctacctctgctatggactttaccaggcctgcaattccctggatatccgaaggaatgataatcttattagcctttccgttggcagctgcctggaatgcttccagactcttaagctggagaactgcattgtcagccccagcctccttgataaagcggataccgtctgccgtagccttctgtacggaacggatggcctctgcttggccttccgcctctctaatcttcttctccttctctgcctcggcggcaagaatagctgcttctttctcaccctccgcattcagcacagctgactctttgtggccttccgccaccagaaccatggacttcttctcgccctctgccctcaggatggattcacggcgctcgcgctctgccttcatctgtttttccatggcctcctggatggctgccggaggaataatgttcttaagctctaccctggtcactttgatgccccatgggtccgtggcaatatccagggactcctgcatcttggcattgatggtctccctggaggtcagcgtttcgtccagctccaggtcaccgatgatattacgcagggtggtggctgtcaggttctcaatggcaagtaacgggcgctccacgccataggcatacagcttcggatccgtaatgtagaaaaataccaccgtatcaatctgcatggttacgttatccttggtgataaccggctggggcggaaagtcctccacctgctccttcaggtttaccttcttggccacacggtcgatgaagggaaccaggaaatgaatgcccacgctgtatgtgcccaggtaggcacccagcctctccaccaccagagcctgagcctgaggcacaactctgatacaggtggacagaacaaataaaataatgactgcaatgatgatgaacgtgatgaatcctccgattgctccaaacatatgaatcctccttatgtttctttatgctttttcaacttcatgttcctgcttcgccgcagctaccagcagctttgccccgctgacagcggatataaccaccacatcacctgcttcaaaggtatccccctcctctgccgccctggcaagccaggtctcaccggccagaatggcggtccctgtacctgccacattatcaatacggtccttgaccacagccttgcggcctgtaagactgtcaacattggtttttgtccgcttgccgtacaggtacttgtaagcaaagggacggaccataagaaacaacatgaaggacactgccacaaacactgccagctggggatacagaccgcctccgcacacctgcaccaccagcgcggccagggaaccccctgcaaaccagatgctggtcagagatgtggtaactccttccactaccagaaaaaccacaaacgcgataagccaaataagggacatgtaaatctcctttcatctgcacagaatatggagaaaattggttacttattcttattgtatcatagtcagatttaaaatcaatcaagggattgtaaatttatcatattcttaatataattgtaagcagtacgaaaggttatacggcagtaaagacgctgctgctgttattatatgtttttgcaaacaggttatacttaacagtaacttaaacacacatgattaagggggcacaatatgaaacgcatactcttactgggaacaggcggcaccattgcctgcaagcgcacggataaggggcttaagcccgtcattacatcggatgaaatcctgtcctatgtgcctgacagccaaagctactgtgaaatccactccatccagctgatgaacatagacagcaccaacatacagccctgccactggctggcagtagaaaaggcgattgaggaaaactacagccaatacgacggctttgtcatcacccacggcacggacaccatggcttatacggccgcggccctgtcctacctgattcagcattcgccaaagcccatcatcatcaccggggcccagaagcccatcgacatggagaatacggacgccagaaccaacctggccgacagccttctctttgcctcctgtcccggcgcccacggcgtaaacattgtctttgacggcaaggtcattgcgggcaccagaggaaagaaggagtggacaaaaagctatcacgccttttccagcatcaactttccgtatgttgccatcatccaggacggtcagattatattttacctggacgacaaggacagggacaaagagccggtctgcttttaccgtcaaatggacggggatgtggggctcatgaagctgattccctccatggacgcttctctgcttgattacatggcggagcattacgacgccgtcatcatagaatcctttggggtaggcggcctgccttcctaccaggacggggattaccacggcgccatcgcccggtggacaggccttggaaagactgtcatcatgaccacccaggtcaccaatgagggcagcgacatgtccgtctatgaggtgggccggagcatcaaacaggaattcggcctgctggaagcctatgacatgaccctggaggccgtggtcaccaaaatcatgtggatacttggacagactaaggaccctgcccggatacgaaggatgttctacgagaccgtgaaccgggacatactctggaaatggagtgaaaattaataccctgcccctttggagacagtatattgacaggagatatccgcgatgaagatagcagtaatactaacccgttttttgaaggactatgtggagtcctattttaattccctttcccttgactgtgaattatcttattatatctacaatgattttgcccatgcaggggaattatatctggaattggagaaatcctacgacggtttcctggtcagcggacctgtccccagggccgccatctgccgcagggtgccggtactcaccaagcccattgtttccttcggcagcaacgccctctgctactacgagacctttttccaggtgcagtttaaagaacaggacttttatctggagagggggtatttcgacctgctggaatggctgccggaaacagttcccctgcaccagtacctggagcggggccagtttaaccagctcatatacaaggtgtaccagaacacctccacctattccctggagcagctgtgcgagatggaaaagaaaatcaaactcaaacacatacgcctttggaatgagaagaaaatccaatactccgtgacccgcttcagcaatattatacaggatttactggacgccggggtaaacacctatttcgtctaccccaaatatgagatactgcaggaatccgtcaccctgctgctgcaggagatacatctgaaaaccattgtacagaaccagaacgccatcacggccttaaaccagcagttttccgacggcgcctctgtcatggctccccagctttccaaagaccctgacacctccgcaccgcttacctcccggagccgtcagctgtcccaaaaagccggcatctccgtatcctatgcggaccgccttctcacagcgctgtccgccatggaccgggactgcatcacttcccaggccctggcagcagccctgcacattaccccccgcagcgccaaccgcctccttggcaggctttccgccaccggtattttcctggagctggaacggcagccgtcctttacaaggggaaggccggaaaagatttaccagtttcatcccgaacttatttcatgaacggcaggatatggtttggaaccgccggaaatggttcaggagcaacgggacatattccataatggactacatacaggaaaacagcagaatacagcaggaagccgtatctgataacgctgataacagagagaacacaaaacagcaaaaagtgagacgtcccggggaacaccccgtccgtctcacttttttgtcaatccgtcttaacccttatttccgtcccgttcacttttaatgggcattcagccatctgaccgcacagtgggcaaacgcagccactgcatgcttcatgccgctttcattgaatatgaccttggagttgtggctgatatagggatacccctcctgcttgtcccccaggctgaccctgaacagaacgccgggcgcctccttcagaacctccgcaaaatcttcccctcccattatctggggaagcatcatggttccttcctctccaaccagctcctttacatagccgaacatctcatcgcccacctggaggtcattgaccgtggccggcagttcgcttggaaattccacctctgcccggcccccgtacatggctgctgtctgttctgaaatctccttcagacgcctcttggccaggcttctcacattctcctcataagcccggatacttccgcacataaatccctgctccggtatcacattccctgccctgcccgcgctaatctgtccaatggtcagggccagcgcgcttcccctgggcttttccgagcattcgatggactgaaggccattgtatatctggcacagaatctgcaccgggttgaccccggattcaggactggccccatgggcgcttttgccccggaccgtgatccggaacatatcggcggaggccatcatgggtccgcgggtatatccgataattcccgtaggcacatgatcccttgccaccacctggtggaaggccatgcatgcatccacatccggcgaacgcagcacccctgcttccaccatggtgcgtgcgcctcctccgccctcctccccgggctgaaacataaacttgactttgcccctcagaaggtccttgtgcttcatcaggagctttgccgctcccagaagcatggctatatgggtatcatggccgcaggcatggctgattccgggatgtttgctggcatattcaagaccgctttcttccccgatgggcagggcatccatatccgctctgagaagcagcgtcttacccggcttttggctgtccagcacagcaacgattccagactggcatatgtactccggctcataccccatatttttaagttcccgctccacaaatgcagctgtttccggcaggtccatgagaagctccggatattggtggacatgacgtctccacccaatcacttcctgctcaattccttctgcttcctttaaaaaatccaccatgtcaatcctccttaccagggcatcgtcattccatccggtatcgggcacttgtagctgcggccctccatctgtctgtcaaattcctctttagcctgtgcaatcagttccggcttttcaatgagcttaaggccgtataacgccattaccttagctgcgtaaatcattcccttttcaccgatggagcttcccgcgcaggatgcaaactgccagctgtgggcaggcgcccccatgttggtgcaggccgtaaagaaataggcggttggaaccagatgcatcacatcccccacatcggtggagccgtagctgttaaagcaggtcacctggcccggtccggtgtacaaatgtgtatccgcagacaggccatattttttcgtggttgccctggcagcgtccgcagtctgttcatccagggctgccgcaaagtccagttcctcctgtgtccatggttcctgcggaatctcgttcatggcttctgccaccacaccggccagcacatgattgttctgggtgttatagcagcctccaaggaattctatttccagctctgtctccgtcatcatggccgcgccttttgccaccttcacaagacgttcatacacattttccaccacttccctggaaaatgctctcatgtaataccataccaccgccttatccggcactatgttgggcgccacgcctccgtccacaatggtgtagtggatacgcacatccgaaggcacatgctccctcaggtaattggcaccgatatcagtcagctccacagcgtccagagcacttcttccgttttcaggcgcattggccgcatgggacgcctttccgtaaaagtggaatttggcagagttcactgccgtggaaacgcccactgttgcctcgttgattttgttgggatggaaattcaccgccacatctaacccctcaaaggctccgccctttgccatcaaaggttttcctgtcagcagctcttccccggggcatgcatagaatacaatggttcctggaagatttctctgaatcatctcctccttaaggccaatcacgccggccacatgggcggaacacagcaggttatggccgcagccgtgtccatagggctgtccctccactggctccttgttgaccgacaccttctggctgagtcccggcagcgcgtcaaactcacccaaaaatcccatgacaggatgaccgcttccatagacagcctttatggccgtgggaacacctcctgccccggtttccacctgaaatccttcctcacgcagcaaatccgccaccttctcctgggccttatattccttgaatccggcctccgggtgattccatatatattggctcaggctgtcgattttctgcctttttctctcaatttcttcaattgcaatctgacctgtcatatactcaaacgttccttcctttagaaaataataggaccaataatacttgcaaacgcaacggatgcaatggtcactgtaacgaaaccgccgataatcattttaggcagtatataatccatggccttctgtctctcatcaccttcccactcaaaggaatcaacgccttccgtggtgataatctgggtggccggataagccagcatacaggttacaccaaccgctgccgatgtgtagggagagcatcccagcaccttgcccacaataccgcagataacaatgatgccgatggagcagattaaaaggataccgaataccggcacgatcattgacagcagtccggaaggtgaaagggttgcaaggcttccgggcagcatcagaagcagaccgaaggtgatgatacctgaagaatttgcttttgcaaagatatccttttccaaaaatccgattctggcaaagataagtccaaacagcaggtaggcaatgttcgggttaaggatatagttggccggagaggatcccggtatcagtgttgcctttcccacaaaatcagcgatacaggccaccagggccactttacagatatagatggtattgcttctcaggtttttaggcgtctctttaaaaatacgcatgctgggcagcttaaggctggatttttcttccaccgtattgctcttgaagaaaccgctgccgcgcttgattcttaactccttgcggatacagaatgtggaaatcgggataccgaaaaatttctgtacggacagtaccagcactgcaaatgccgccagctccggacggttggcagcttccgccgcacttgtaactatgatgcctgcaaccgtggaacctgccactggaggcgctgcaatcaacgcatactctcttccgaacagcagggaacccactgtaaaacaaatcagtgcaatcgccgcaatggcaaacagtgaaataaccacggttttccattcccgaatcaggtcttccagattaatcagcgtaccgatattggtaatcatgaatgccgtaccaaaattcgccataaccgccaccagaccggactgggtggtaatgtccttgggcagcaggccgctccagaaccctatgaggaacaatacacaggcaaacaacagtgatgaaacagcccccttggtctttttagacaaaaattcaccaaccgaataaaccaccaggcatcccgtaatacaggtcaacggattccaaaaactcattcccatttcctcctaatcatcttttgctttttcactttttacctgtgcgcacatgttccatacgcatatttaaggacgttttgtctttaaaattcctttgaattaaggacgattttatgcgtattttttattgcttcaataatattatttaccataattatatccatatgcctatattttgtcaattaatattttattttttggacatttccactattattcgtcttttattttgtctaatataatgtccttaaatatgtctttattttgtggggccggattttccagttgaaatcactaaggcccccattcctctcacccactccgtatctttgctcctgcaccgcttatctccaataaaaatggcatgcccggactgccggcatgccaataacatatatgggcccgcatcaatatggcgttatcttaacaacagattgacacggtatatttttttctttcccaggcagggaagagacagcggacgcgttggaaatgcagcgggtgaatggcgggtgagcggcgggaacagccgcctcccgcgggtccgggtcccctcccccggcacgcatcctcacctcattcaccaccgtaaaaccaagtatcattcctcctcccaccacctgaaacacagtgatggtctcatgcaggaaggtcacggataccaggatggccacaaggggatctatgtagctgaggatagaagcctcctggcccttcagataacgcagggatgaaaaatacatgcaatagcatatgcctgtgtggaacacccccaccaccagaagatttatcaccccaagggcatccatatccaaaagatgggaacccccagtcaggcatacatagggcgtgagaaccagaatggctgccaggaactggaaaaatgtccggttgatacccgatacatggcgtatgcttttattgagcagtaccaccgacgcataaaatacggcagcacccaggccgaacaaaatcccaatcaaatcactgctgctccctcccctgctgacgcctatcaccagcaccagtcccagtgtggacatgataaaacagaacacctggcgggcggtaagcttttccttaaagaggaagggacttgccacggttacgatgacaggggcgaaataatagctaagggtagccattgcaaccgtggtataccggtatgcctcaaaaaacagtatccagttgattccaatggccgcccctgacagaatcagaaggtgcagctctgcctttgcatcctttatccctgtcccctggccgctgcacagctgccagaggaaaatggcgccggcagcaatcagggcccggtacagggccagctctcctgacggcaggggtatgtgtctcacaaaggctcctatggtgccaaaggctgccatagaccctatgatctccagttttgctttcatttgttctctccttccgggactcgtccatccctatatcaggcccagggtacggatgaggtccagccacagcgtcagggtgaaggcactgccgcaggttgtgattgccaccacactggagctcagcacgccttcatgtcccatgttccgcgccatcacaaagcagctgacggttgcggcagaccccagcatcacaagaatcgccaccagctgctgctcccggaaccccaggtacactgcggccggaaggaatacggcgcagagaagtaccagctttatggcgctggcgcccgcagctgccccgactctttgggatgcctgcctgaagtcaaaggacgcacccatggccatcaggcccaggggcgtggccactcctgccaggctggacacggttttttccatgatttggggctgcttcagtcccagcagtgaccaggccatgccggtcaggattcccagtatgataggattcttaagtatgcacgccgcggttttccccagcatccggcggtcaaggaccgccccttccggatttgtaaaggacagaatcaccacagccatcacattgtacagcgggacgctgcctattatcatgagaggcgccatccccacatccccatatatgttcttaatgaaggcaatccccagcagggccgcgctgctgcggtaggaagcctgtatgaattcccctctgagcctcctgtccttaagtgccatggacagaagaaccgccagcaggattcctcccagggtagaggcaaagcagaacatcacaaacctggtatcccacaccttcaaaaaatcagaatttgacaggtcctcaaacagcaggaccggaagagccaccttaaacacgaactgattggccttgtccgcaaagacaccttccataattcctgcttttttgaaacacgctcccaataccataagaaaaaagatgggcatggtcgcattgagactgaatatgagatgttccaccgcagtctgcctcctgtcttttttgcacattttccctgtaacaatatacgctggctgtttctttgtcaagtctttcaagagcctttaaggattttcttattgacattttatccgtcaagtgattaaatagaattgacttattaatattattttaaaaagttttttaataacaatgtaaaaggagagaatttttcatggcccaggaagaaccggtcactgtaaaacaattgaataaagaacatatacgagcttacatgggtaaacatacatctgcttccaaaagccagattgccagggagctgggattaagtttccctacggtgggacgtctgattgacgaactgtgttctgacggggaactgaccgagcaaggggccggctcttccaccgggggcaggtgcgcctgcatttatgagctgaatccccttttcagcctgtatctcctggtacaggttgagtcggaccgggtatgctggaacctgaaggatttaagggagaacaccgtggagcaaggatgcctgccctttgaaatcctgtccctggaacagctggatgccctgattttagatatccatcaccgctatccccgcctgaaggctgccgccgcagggattgctgccctggtaaatcacggagtggtggaggagaccaatcaatatatcggactcaaaggcctgaacctggaagagcatttccggcgcctggttcccattcccatgacagtgggtaatgatatgaatttcctgaccatgggatgctgggctcagaagcatcccgatgccggctccctggtcacactctttatgggaggaaacggtataggaggcggaatggtcattaacggccagctgtggaccggcgcctcaggctattgcagcgaggtcggcttcctgcctgtctatgaacggttaaacaagggcagcctgggccttccccctgccgagcacataagcgagctgtacgcccgcctgatacaaatttatgccgtgacggtaaatccccacatgatggtgctctaccgccaccccctgctggagggaaggttagacgagatccgccgtctctgtgcttcttatctgccatccaaagcaatcccgtccattgagctgtcctatgattaccagcaggattatgaaaaaggcctgtttaccgtggcaaagtccatggggcaggctgtaagcgaaggaggtttataatgcgctacacccattttgtgtttgatattgacaatacgctgattaataccacaggggccgtgctccacggactccagagagccctcagggatgtaaccggggaacactgggacttaagccggcttactccggttctgggcataccggggctggatgcatttgaacgtctgggcatacattcccctgaacagatattccagatttatccccgttgggaacagtatgaacaggagtatcagtacactgcctatctgtatgagggcattgtccctctgttggattccctgaaaaaaaagggctgcgtcctgggcatcatcacttccaagacaatgccccagtacaccagcagcttccttccttttcagatatccgaatattttcagaccgtcataacggccgatgacacggtccgccacaaaccggaccccgaacccatgcttgcatatatggaacgcaccggagtctgcccccggcagattctctacatcggggacagtatctacgacatgcagtgcgccgcccaggccggagttgactcctgcctggctctgtggggatgccactgtccggacggcatcttatccacccaccgttttgaggaaccggctggaatgatgcgctggctggaatgatgtaccggcccaagtcggatttttccgtcagcggtgtcaatctggactggttaaatattatctaactggatatttcactcagtccacctttccgttatagtaggtatcaacatttaagtactttaactttaggaggtatccctatgacggaacgtttctctactaaaaaactggtgctgtccgccctctttgcagccctggcctgtgtggccactatgtccatccgcatccccacccccggtacaggcggttacatccatcccggcgacgccatcgtgattctctgcggcgtgtttctggacccggtatccgcattcctggcagccggcatcggctcctgcatggcggatctgctgggaggttattttatctatgtccccatcacttttgtcattaagggactggtggcattctccgcaagccatgtctgcggcaggttaagggccagaggcatgaatccgtatgcagccgtggccggctgcggtgtgattgacatcattctggtggccggaggatactgcctgtgcgaaatattcctatatggattaggagcagccctggccagcgttcccagcaacattatccagggaatcagcggcctgattatctccagcgccttgtatccggtcctgcaaaagccgctttccatggctttaaaggcttagaccgcatcctgcatctgcactgcgtcctgcacctgcactgcatcctgcatttagaccgtgtccagcatttcagccacggtctctccgtaaatgggatggcgcttatatggcgctatctcggccaaaggtttcaggacgaaatcacgcttgtgcatctgtgtgtgtggaatgctcagccgttccgattcatacaccagatcgtcataaaaaatcacgtccagatccagggttctgggaccccagtgtatgatccgctcccttcccgccgctgcttcgatttcatgaagggcatccaacagctcctccggtgtatagagtgtttttatttccatacagccgttgaggaaatcagcctggtccgtcaccccgtaaggaggcgtttcaataaagccggatacccggcccacacggcactcccgaagctttccaagggcctccaccgccccggtaagatacgccagcctgtctcccatattagagcccagggcaatgtatgcctgatgccatcccctggtgatcctgactgatacatattgaaggggaaggcctatgggggcccagggctttcttatctctaattccacggatttcaggctgtctggatacatgagcagcagttcctccgccagtttttccgccgcgctctctatgagctggaaggtatgctccctcagatagcgttccatgaatttgcttgccctgccgtagctgatggtctggtccagctggtcattcctgcccgcctttctcgtatctgtaaagagcactgccgataccagaaacttctgtcccagtacattttcctccggtatggccccgtgttttgcaaatacctccaattgttcaatcctgatttggtccatgtcctgcccgctccctttctgttttctgtatgatttgatcccatgtctgcatttcatattccggttcctcatttaaactccggggcgcccataatagaccgggccatcctgacagcccttttattcccctccacatcgtgtacgcgaacaaaggaacagccagaaaagacggcggccgccgtcgtaaccagggttccctcttcccgtttgtccacaggaagatccagagcaaggccaatcacagacttcctggacgcccccagaagaaccggatagccgaaacgcttaaaagcagacaaattccttatcacttccagattcatctcatatgtctttccaaatcccacaccggggtccagcacgattctgtcatcctttatgccggcctgttttgcaaggagaatggtttcattcatctcctccagggcggtattcataaaatggtgtccgacagggttttgcctgttatgcataaggcagcagcacacccccagctcagcaatggtccccgccatgtccttatcttttttcagcccccatatgtcattgaccatggcggcgccggcctccacagcctgccgggccaccccgctcttataggtatctacggagatgggtatatcaaaattttcatgaatcagccggatgacgggaaggacccgctccagttcttcctcctccccaaccggcctgcatcccgggcgtgtggactcccctcccacgtctatgatatccgcaccgtcaaacaccagtttctccgcctgtctgagagccatctcccggtcacagtacctgcctccgtcggaaaaggaatccggcgttgtattcaggatgcccatgacataggttctgttccatacatcaaattctttttgtcctataatcatctgattacccccttaccatttggaaaaacaggtttaccaggttctcccgctggcagaagcaccccctctttaccaccgtgacagtccggctgcccggctttttgattccccgcatggtcatacacatatgctctgcctccatcatgaccataacgccccggggcgccaatccgtccatcaatgcgtctgctatctgggcggtcagctgttcctggatctgaaggcgtctggaaaatacctccaccgtcctggccagcttgctcagtcccgccaccttcttatccggcacataggcaacatgcactttcccgtaaaaaggaagaagatgatgttcacagacagaataaaaggttatgtccttctccacaatcaggtcattattttccgcccggaatgtcttttccagatacatccctgggtgttcatccatgccgctgtacagttcctcatacatcctggctacacgctcaggcgtatcaatcaacccttctctggacgggtcctcgcccattccctccagcagaagcctgacagcctgctccactttattcctgtctatcatccctgttcctcctttctgtctccttcataatctgccccagataagacagggagccaaagaccagtacggctccctgctctccggcgtctttcagtgccatgtccaaggctgtttccaccgaatccactgcctgcgttccggcacagtattttccggcctcccttgcaagtatctccggattcaggcttctgccgcggtccggcagccataccgtatagattctttctgccaggggagccatgatttgcgtcatcaggccgtattccttgtccccaaacactcccataataaaaatcaggcgcctgccgttcaaacaggtttccacacattccctcagcctgagggccgcgtccctgttatgcgctccgtccacaatcaccatgggggatttcttaagcatctggaaccttcccggccaggaaacattggaaagtccctttctcatggcagattcaggtatgtggatgcctttgcggctcagggcagaggctgcctccagcgcaagagctccattctccaactgataggtccccggaagggatattctgattccttccatggccttataggtaaacacattttctgcatactccccgcgattctcctccctctccggacaggatagggcgctcaggctgctcatatccacctgggtaaagacgcatcccttttcaccggcgcggtccttcagtacgctgagcacttccagaggctgatgcgccgagacaacttcacagcccggcttaatgattcctgccttacaggcagcaatttggcccagggtatttcccagcacacccatatggtccatgctgatggaagtaaaaacagccgccagggtattctccaccacattggtggcatcctgttcccctcccagccctgtttccagcaccaccacccggcagcccttctctttaaaatacagaaaggccatggctgtctctatctcaaatacagtggggattcctctccccttttcttccatgcgccctgccgccgccttcacccggtccgccaataaggcaaattccctttccgtaatccaggatccgtccacctgataccgttcccgcaccgagataacagccggcgaggtataggtgcctgtacggcagcccgcctcctttaatatggaagaaagacaggctgacacggacccctttccattggtcccggcgatgtgaacaaattccaaatccttctgcgggtccgacagctctctcagcagatttcttatggaatccagtcccatgacgcttcccagcccagacctctgctccagaaaatccaacgccccgtcaaagtccatcctctccccagagtccgccgtcaccccaaaatccaccgcctcattaaaatccatacctgcctccttcctgccatccttacatcttacgccttctgcacgcagcatcccattctgcagcctgagggggttgcggcgcagccgcccagggctgtttccctcagctccaggggaagccctctgccaactgcatacatggcttccagcatttcatcaaacggaatcagctgccgtataccgctgagcgctgtctccgcgcagaccagggcgtttgcagcccctgccccattccggttctggcaggggcattccaccaggccgcccacagggtcgcataccagtcccaaaagattcatcagggcagcggacgcagcgtccaagctctgggcgggagttcctcccataagctccactgcggcagccgccgccatggcgcaggccacgcccacctctgcctggcatccccctaccgcccctgacacggtggcgttgcgcatggccaggtatccgacggcagaggctgcaaacaggccgtccgccaccaagtcgtcctccaggccgtattcctcctggagggccagcagcagtcccggcacaatgcccgaagacccggctgtaggtgctgccacaatcagtcccatggaggtattaacctccaaaacagccatggcatatatgacagccctgcccaggacgccgcttaggatggaggtgccctttctgcgccgttcctccatcctggccgattctccgccaatcaggccgccgatggatgtgaccggttctctcagcggaagggtggctgaatccctcatgaccgccagtacatccttcatcctggcctccatgtcctccatggatacgcctgttaaatcacattcacgctgtttcatcacttccgatatagtcattccccggacagcgcactgctccagaagctctgccccgctcttaaaatccatgtccatccctccttatacctgaaccagcatggtatggtatacatgcgggttgctgttaatccaatccgtaatctccagaggcaggcgttcatcagactccacgatgcagtaagcctgtgctcctttttcctccctgaaaagcttcatgaaggcgatgttcacattgcagtcgctgaggcacttggaaatatgggccaccacccccggtttatcctgatgtatgacaatcagggaactgtactcgcctgtaaagtccacatccacctggtttatctttacaatgcgcacctttcctccccccagggattccccccggaccgtcatctcctggttccggtcatttaccatgcggatatccactgtgttgggatgtacgtccttatccttctcgtttgtcaggaaggaataccgcagtccccgttgctgcgcgatggaaaaggaatcgcggatccgcctgtcatctgtcttaaatcccatgattccccccagcagcgccctgtccgtgccgtgtccgcggtaagtcctggaaaaggaaccgtacaaggtaaactctgcctcgataatctgtcctgctatcattttctgggccaggagggctatggccaccgctcccgccgtgtgtgaactggaaggccctatcatattggggcctaatacgtcaaatgcactgatgactgccataaacttattcctcctgacattctgttctcctggttactgtctgctcttaagcttgcccggagcctgtctgggaaccgtgtggatgctgccgccttcaagctcctccagcgcctctcccactgcctcattgtaggtgggatgggcgcgcattcccagaagcagctgtggtacggtcagcttgtttgcggctgcggttgccatctccccgatcatgtccgtggccctggcgcacatcatctgggctcccagcaccaccttggtgtcggcttctgcgatgattttgataaagcctctttcctccctggatatctgtgatttcccgttggcagacatcaggaatttccccactgatacaggtattccagcctgggccgcctcgtcctccgtaagtcccacggacgcaatctcagggctggtgtacacacagctgggaactaccgataaatcaatggagtgtccggttcccgccaggtgttccgccacccacacgccctgggcactggccacatgagccagctggattcccttaatcacatctccgatggcgtacacgccctccatggatgtctcaaaattggagtccactgtgattcttccccgctccatggcaagctctgtccctggtcccagcagcttttccgtttcaggcaccctgccggcggccgacagcacataatctgcttcctcccgcttctcctcacccttttcctcaaagacacaggccagaccatgttccgtcttttcaattctctttaccatggcccctgtatagattttgattccccgctttttgagaatcattttcaggttctgtgaaatgtccttatccagatttgccagcagtctgggaagggcttccacgatggttacacggatgccaagggatgaaaatacagatgcaaattcagctccgattacgcctccgccgataatcagcaggctttccggcgcatgctgcagccccaacagcccgtcgctggtcagaacccccggcagttccagtccctcaatgggcaggttcatgggttttgagcctgaggccagcagcacatgcgttcctttcagcacccggctctcctcttccccttcgcaccctgtcaccagcacggttttgtccgcctgcagggtgccggttcccttaaccagtgtcacgttgtttgccttaaagagctgttccactccctgtcttaagcttcctgacgttccctccttatattccagaatcttatcatactcataccggacattctctgcaaagatgccgaactgcccgccctccttcatctccctgtaaagccgggacgcatgaatcatggctttggccggaatacagccacggttcaggcaggttccccctacctccctgttttccaccactgccaccgaaagtcccagcttggcgcccttgatcgccgccacataaccgccgggacctgctcctataataaccaaatcaaatatatctgccatctttcctcctattgccgccaaagagcgctggagcgtgtctgaaaatttatttcaacacgctcctgagcactgcctgtattttttcgtaaatcagttacttactccccgatatagcgcagcaccggctttcttgccgcagttacctcgtccagcctgcggaccggtgttttgactggagcctggtgaaggctctgcggatctgcctttgctttttcatatatgctgcggaacacctcaatggcttcgtccagggtttcctttgactctgtctcagtgggctccaccatcagggcctcatggacaatcagcgggaaatacatggtggggggatgaatgccgtaatccagaagtgccttggcaatatccatggccgacacattgatatcgtgcttcaaatcctccagcgtcatcacaaactcatgcatgcaggtttcattgtaagccatctgatacaggtctgacagcttattcatcatataattggcatttaacactgcattggatgacgcctcgggaatgccttccctgcccagggtcatgatgtaggccagcgcctttaccaccaccccgaagtttccatagaacatcttcacgcttccaatggattgcggccccttaaccataaagcccggaaggaagggacgcaggaattccttgcagccgacagggccgcttcccggaccgcccccgccgtgaggcgtggaaaatgtcttgtggaggttcaggtggattacgtcaaatcccatatctcccggcctcacaatgcccatgaccgcgttgaggttggctccgtcgtaatagcacagccctcccccatcgtggacaatgcgggtaatctccaggatattcttgtcaaagagccctaccgtgtttggattggtcagcatcagtcctgccgtgtcctcccccactgcctccttaagcttatccagatccacacatccgtcctccctggaggggatgctgacaacgctgtagccggccatggtggcgctggcgggattggtgccgtgggcagagtccggaacaatgattttcgtcctcttttcatcccctctggagtgatggtaagccttaatcagcagcagacccgtaaattccccatgggcgcctgccgcgggctggaaggtcattgcatccataccggttatctcgcacagatactgctccgccagatcgaataccctgagggcgccccggaccgtatgttccggctgcagcggatggatgcccgcaaagccctccagcgacgccgcctcctcatttacctttgggttatacttcatggtgcaggagccaagggggtagaaaccgttgttgacgccgtgggcgcgccccgcaaggccggtataatgtctgctgatttcattttcagagagctccggcagattcagcttctccttcctgccaactcctatctgatggaccggcacgtcgcagtccggaagcaggtggcagtgcctgccgggagttcctttttcaaatattaatttcatgctccgcatacctccttcacgatttgaaccgcctggtccatatcttccttccggttctgctcagtggcgcaccagagaatctccctgtggctcagaggcagtcctcccaggattcccttctcctccagagcttttaagattaggccgctgtccgtatcgctttcagtgacgaactcatggaagaattccctgtcatacctggccgtgaggccggcctgttccagttgttccttcaggtaatgtgctttggaggtacagagaacagcggtctttcttaatccatctgctcccatggccgccatatatacgctggcagtcagggcgcagagagcctggttggagcacacgttggagctggccttttcacgtctgatatgctgttctctggcctgaagggtcagcacatacgccctcctgccgtccacatcctttgtctctcccacgattctgcccggaagcttccttcccatagctgatgtggctgtcataaagcccaggtacggtcctccgaagctgagaggcatgcccaggggctggccgtctcccaccgcaatgtccgccccgcattctgccggcgtaggcaggagcgccagggagatggggttgcagcccatgatatatttggctcccttttcatgggtgatttctcccagaaggctgcaatcctccagattgccatagtagttaggctgctgcacatagaagcaggctgccgtgccgtccattaattcccttaaggcgtccgcgtccgtgactccgtccttttcaggaaccatcaccacctgggctccgcttccgaagcagtaagtctttaccacctccgtgaccagcggatgggtggtttcggacagatataccctgcttctcttcctgtccctgcacatggccgctgcctcggctgctgccgtggccccgtcatagacagaagcattggacacatccatgcctgtaagctggcagagcatggtctgatattcaaatatggactgaagaatgccctggctgatctcggcctggtaaggggtataggatgtaagaaattcctccttggataccacgctctttacaatggaaggtatgtaatggctgtatgctcccgcccctctgaatatatgtttaaacaccacattctgttttgcgatttccttcatcttcccgatgacttccatttcgccaagcccctcaggaagctttaaaccgccttttacacggacctcccgggggatatgggaaaacagcgcctcaaagctgtcaaagccgatttccctgagcatttcctgctgctcttcactggtattgggtacataagaacccatgggtccacctccttttcaagatgtctacagtgtttccagatatgcctcgtaggcctccccgtccatcagttcctctttgccgcttacgtcttttactttgatgaaccatgcatcataggggctctggtttacagattccggactgtctaacagttcctcgttgatttcctctacctggccggtaacaggagaaagtacatctgatactgccttcacagactccacatctgaaaatgcctcgcctgccgtcacatcgtctcccggctccggaaggtttacaaacaccaggtctcccagagcatcctgggcataatccgtaagtcctactgtcacggttgtgtcatccactgtttttacccactcatgggattttgtatacattaattcctttggcacgttcattttttatttcctccttgttttgagcatttcataatccctgcttatttctctctcttataaaatggaagcttcaccacttccgctccaaccctgcggcctctcacatccacctcgacctgggtgcccggctccttgtatgcaatatccaccaatgccatggctgccggatatcccagatacgggcaatgggtgccggacgtggtggttccaatctgctgttccccggcaaataccggctcatgctctcggatgatgcccctgcccgtaaccttaagtcccacgcgcttcctggtaagaggtcccttttcctgcaatgcctttttgccgataaagtcctccttatccatcttgacaaagataccaagacctgcctccttcggagtgatggtgtcatccatctcatgtccgtaaaggggcatggatgcctccagacgcagggtatccctggctcccaggccgcagggtatcagcccttcctccctgccggcctccagcaaaagctcccacagcctgggagcgtcgttcccggccatgtagatttccactccatcctcgcctgtataccctgttttggagatgatgcagggaataccgtctatgcagcagtccttcttaaaggtataatacttatccgggatggcatccgggtccgccaccttcttaagtacatccagggcttttggtccctgaagggcaagctggcccacctggccggatatgtccttaagctccacatcaccggacacatggtccttcatccactggtaatccttatccttgttggatgcgttgacaacgatgaaatagctgttgtccttaattttatagacaatcaggtcgtccaccacgcctcctgcctcgttgcacatggggctgtatctggctgtaccgtcctccatgaccgtataatcattggtcagaagcatattcacattcttcagggcatccggcccgcttaacaaaatctcgcccatatgggacacatcgaaaaggccgcactgctcacgcactgccatgtgctccgcaatcactcccttttcgtactgaaccggaaggaggtagcctgcaaacggcacaatctttcccttatactttacatgcatgtcatacagcggtgtctttaattccatattctctgctccttttttccatattctatggttgtatctcaacagttccccaactgcttcgtctcatttccagtttcccggcagcttactggtacagcggatatttaccgcagattttgtcaacctcgcctctgatataatcagccttagcctcaaaatcagtggctgccagccagatgcactcagcaatcttttccatatcttcttccttcagtcccctggaggtgactgccggtgttccgatgcgcacgcccgaggtgacaaaggggcttctgggatcattgggaaccgtgttcttattcagagtgatgtatacctggtcgcagcggttttgaagttccttgccggatacgtccattcccctcaggtccaccagcatcaggtggttatctgttcctcctgtgagaatgttaaaaccctgccttttaagagctgccgccagggctgctgcgttcttaaccacctgctcctggtaagccttgaactccggccgcagcgcctcaccgaagcagactgccttggctgcaatgacatgctccaaaggtccgccctggattcccgggaaaatggccttattgaaattgaatttgtctgccactgcctggttggccagaatcatgccgccccttggaccccttaaggtcttgtgggtcgttgtggttaccacgtccgcatatggaatgggactgggatgcacacctgccgccaccagcccggcgatgtgagccatatccaccatcaggtaagctcccaccttgtcggccacttctctgaaccgcttaaaatcaatggtccggcagtaggcgctggcccctgcgatgataagtttcggcttggaggcaactgctgtttcctccagtttgtcataatcaatgtacccatcctcattgacgccgtagggcacaatgttgaagtacagtcctgagaaattcacagggcttccgtgtgtcagatggccgccgtggtccaggttcatgcccataaccgtgtcgcccggctttaacatggctacgaacacagccatgttggcctgggctccggaatgaggctgtacattcacatagtcgcatccaaacagcttctttgcccgttcaatggcaatggtctccaccacgtccacaaactcacatccgccgtaatagcgttttcctgaatatccttctgcgtatttgttggtgagaaccgttcccatggcagccatcacgggctccgacacaatgttctcggaagcaatcagctccagattccttctctggcgtccgcactccgccttgattgcctcccctatctccttgtcatatccttcaataaaatccattacctgttcaaccattggttcatatcctcctttttatttttcatcacggacatatccatatgcccttcatcacaaacacatccatatgccctgtttccgcctccgaaaccataccacctccctgtttgtaccgcgcgctttttttgaaggaggcccgtatacacacatgccctgtatccatgacccggatatcaaaaaaagcgcacgaacaaataatgttcatgcgctctgtctttgtacctgaaagatttggcttcgtcggtgctatcgctttccagagtttcgtccagtatccggttcttttgcctgagagttcttcgcttccccttcggcgctgcctgtgcagtctctcccgaatccatcatccgattatataaaattgtcaacaaaagcatttctatatgattctgctttgtgctaatgtcatagtatcacacttaatattttcagtcaataggtaaaatgtgtttaatttttaacgcattttgccgttattgcattgtgttttttgccctatcagcagttttttcctgctcctttatgcacacgcggctgaccctgtaggagtacaaaagaaatgccgtcatgacgatggacagggctgccacaataatccaggcaatgttgtatgagcctgtcaaatcataggctgacgcaatcagagggccgcccagggcgtatcccacgctgggaaacagactcaggaatccatagatttctgcgtaatgttttgtgccgaagatgccgctggtgataaccggagcgcttacagttcctatacaggtcccgaatccaaacaaaattgccatcaggtacaggaagggctgatgtttaataaatatcaaacaaataacggaaagaaaaaacatggtatttccaaatagtattcctgccttcacaccatacctgtcataaatatgtcccagtaccaattttccgggaatggcaataaacaggtacaaggaggcgatggaggccgctgtggtggttgcatatccggcatccataaccgaggccggtatctgtgtaatgacggctgcagtggctgaaatcagcgtgcatcccaatacaaagcaccagaacatgggctttttctttacttccttcagcgacacattccactcccgctctgttttcctggcctttcctgtctctccctcctcatccgcgccgtatgccttggtccccatatcagcgggagtccgcctgatgacaagcagcaccagaggaaccaggataaccagcctggttatgcccacagccttatatgtaaaccgccatccctgggatgcgatgaggtttccgattatggggcttaatatggttccgcctatactggatcccaccatggcaatactcataaccagtcccctctttttcctgaaccagttggtaatcagtacgctgaccggaatcatagtggagccgcattcaaaaaatccgatacaggctgctgtcacgtaaaactggggcagggtgctggcaaaggaataacagtagtacgccagacagtttccaatcatacacaccaccagggctttgtgcatgtacggctttgacatgatctttccaatgaacggcgacataaatgccatcatcagggctgcaatggtgctgaccagcgcatatccgctcctggtaaatcccagatcctctgtcaccggttttgtgaacaggcttgcgcagctcaccagaggcgcataccccagccccataatcagaatacaggtcagcagtatgagccaaccgtaaaaaaagcgtttgttttccgccatattgtcctctctttccccagacatgttctactggtttccatggaggtccagccatctcatggctgtcccggcataaatagcagcgcctttgacaagggcagactcatgaaaacgcaccttgggattatgctccacataccgttttgaaacatcctcgataccggctccaatgcacatatagctggccggtattttttgggaaatataggcgaagtcctccgatcccatcacatgataagcgcagaccgccttcagctccggctccagctccttaagcccttccacaatctcctggttcagctcctcattgcacctgacaatgggaatatcgcttatcacctcaatctccgcctttgtgcggtaggcccctgccacggaaggtacaatttcattcagccgtgcaatcagatgagacattgttttttcgtcaaagctcctcatggttccctgcaggacggcagtctcaggaatcacattggaggcgctgcccgcgcagaactgtccgatggtcagggctgtctctgagatggccgggcactcccttgcaataagctcctgcagcgccagatagacatgtacgcctgtattgatgggatcaatgcatttttccggcctggaaccatgtccgccctgtcctgtcagggtaatcctgaatccatagacccccgccatgggaaggcttccgtaggcaacatattccggggacatctgggctgccacatgcatggcgaaggcgctgtccacctttggatggtccagcacgccttcctcaacggctgccctggctccctggaaggtctcctctcccggctggaacagaagctttacctggcccttaagctcagactcatgctgcttcaaaagccttgcagctcccagcagcacggtagcgtgaagatcatgtccgcaggcatgcatcctgccgtttcgggacgcaaattcctcccctgattcttcctgaaaaggcaggccgtccatatcgctgcgcagcataaagcatctgctcccttttccaagaattccaaccacgcaggaaccattgaccttaatctcataaggaatccccatctcctctaacttttcccgaacaaacgtacttgtatcaggcagctccagccccagttccggcatggtgtgaagcttgcgcctccaggcaatcagatctgcctccatggtttttgcctcttccagtaattctctatacattcttttacccctttccttcagacaggctctttgatttttataactacttctccggagtttcgttaacttttatttatttctgtgatataatcttaccatagctcccgggcattcggttattccgaatattttatgggttataaccattttattattaggcaaattgtacacaaaaggggtaacatcatgaatttcagccatttagaatatgcaatgaccgtggcagaatgccggtccatcaacaaagccgcccagaggctgctggtctcccagccctatttaagcggagtccttaagaatctggaggaggaactgggctgccagctattcaaacgcagccacaacggaatccttctgacagaaaaaggaataaaattcatggacagtgcccgcatcatactgtatgaatatgagaaattaaaacagctgtcctgggatgaagcagaacagcctatggtgatttcttcctatttcgtatccaatattatgaggctttttctggaatttaaaaaacagtctgccaaacagtttccggaccgtctgacagaaatggggaaccaggaggtcttggagtcggttgcggcaggccgtacgcgtcttggtttcattctctgcgccgtagaaaaaaaggaaaaatacctgaggctggccagggacttccactgttcctgcgaagagcttatgacttccattccgctgtatgtaatggtttccagggagcatcctctctataagaaaccttccgtatccataaaggaattgtttgactatccctacgtgcatttcaatgatgtctccgccatctcctacctgaagttagtcggcctgtccgaccatcccaaccgcctggaggtagataaccgcgggcagttctttgatgccatcagagagggccaatacatctccctgtcagtcagaggcaaaacctcggatggacgcggattctgtttcgtgccaatcagcgacaaaaacctgtatctgaacctctattttgtgacccagacagactacaggcctaataaaagggaacgggaattcatacggtttctgcgggattttgcagccttagacggacagacgccctgacaaaaaaggaccgtaaaagagaggacagcccactgtttctggcgctgtccccaatgctgtttcttctataataatatatttttagtttccaacgctctagcttccaactctttccgccaaactcagctctctatcagcttcatcacatccgccggccttaccggaatccgcttcacctgttttcccactgcattggataccgcgtttgccactgccgcggccacaggtaccacagaacactcgcctatgctcttggccccaaaaggacctgactgctcaatttgttccaccagccccactttaatgggaggcatctcctgtgcgttcagcatgtggtactgttttaaggtggtattctttacctttcccttatcatccagtataaagccctctgtcagggcatagccaattcccatctggaccgcgccctcaatctggccttccacgcccatgggattaagcgccttgccgatgtcgtggactgccgtgtaatccagtacctttacactgccgttttccatatccacctggaccttggcaaaatgggctccgtaggatacggccatggcgcaggaggcaaatgtgtccgcgcagcagatatccctgccatgggcctgctttgcatatttgatcacctctgccagggaggcagacgtatcaggcctggaaatgcagtaaaccctctgatcttttaaatccagctcactctcatccacttccagcaggccggaagcctccttaagaagctctgttttcacctgaccggcaacctttaacgctgcgctgcagctcacaaacgtacctctgctggaataatttcccatatcccaaagcgttgcatcggtgtcggcctggacacattcgatgtgcggcatggggatgcccagtatctcgcttaccacctgggtctgggtggttacggaaccatttcccatatcactgacaccggtaaacatcacagccgtgccatcctcattcatcttgatgatgactcccgttgtatccggtcttacgccgaatacaccgttgccgtgggctgcaacagccatgcccacgccgattcggtacctgctgtccgcggcatcctcctgttccctgacagcctcctcgtatcctgacaattccattccctttagtacacagtcaatgggcctgggatttccgtggggcaggccgtccctctggtcaaacccatccggctccaccaggttcttaagctggagctggattatgtccatgcccagatcctttgcaatcctgttcagctgacactgctgggcaaagaactcctggggagaaccaaagcctctcatggctcctgccacaggagtgtttgtgtacaccggcacagcatgaaaccgcaggtttggtgtcttgtggttcttaaaatatttgccgctcatggcccagacaatgctcatggttccgcctgcatacgctcctgcattcacaatgacatccatttcctgtgccacgatggtgccgtcctttttcatgcctgttttcagatggagcttcatgctgtggcggttcctggatgagggaatatcctctctcctggtgtataccaggcgcacgggacgtcctgtcttcatggccagaagggccgtgacaggctctgtcaccatatcaatcttcccgccaaatccccctccgattccggggttcaccaccctgatccggctcatggggaggccgaagatccgcgacagattggttctgtgcccgaacacatcctggctgggcgtgtagacggtgagcttgccgctgctctcatagacagccagggatgtgtgcgtctcaatggccccatgatggatggcaggtgtttcaaagtcgtcctcgtagatataatccgcttccgccatccccttctctacatcccctgcctcctggactacttcctcgatcacattggaatccttgtggatgggatatgccccctccttcagggcctcctccggctccaggtaatacggcaactcctcgtattccacacgaatcagcttcagggcctgctccgctatctttgctgtctcggctgccacggctgccactttgtctcccacatagcgcacggtgctgtcaaatacccgctccgttttctctccgtcaatctcctcgccgcagctgttgaacagggcatccggcgcattcttccagcacacaaccgcccggaccccttctaactgctccgcctggctggtgtctatggatttgattctggcatgggccacagggctgaacagcacctttgcatgaagcatatggggaagagtcatgtctccaacgtacttaaactgtccggtcaccttcagggcagcatccctcacaggcatatccgtgccaatcactccgtttttgggcgtctgtaattccatcctctacttcccctccttctgcatccggctggctgccagctgaatggccctgacgatttttacatatccggtgcatctgcacaggttgttggaaataccggctcttatctccgcctctgtgggatcgggatttttgtccagcagcgccttggccgacatgatcattcccggtgtgcagtaaccgcactggaccgctcccacgtcaataaatgcctgctggattggatgaagatggattccgtccgataaaccttccacggtctcaatggtcttacccaccgcattcctggctaggacaaggcacgaattcactgcctccccgtcaataattaccttgcaggcaccgcagtcccctgtattgcagccgcatttcacggctgtgagctccagttcctcccgcagtacatagagcagagtccagtttttttcaattgccacattgtagttttttttgttaatatttaaacatatctgttccatctaaccatctcccgtctgtcccggtatccttttctggataaaaaaaacataagcatgtcggcctttggtaaagaaaggtctccaaacttatgttccgcagtatgatataaaaagcccaagctttgcatttatctatatatttcctgattataccaattcagctataaaagtcaacattctcgaaaaagattgtcgctttatcacaacagagaacgacttttttaagcactttttacaaaaataaactttttttactggttttaccgcctgatacttcccgctgtttctcaaaaaaaccttgcaaattaaggcactttgccattttacttatcataattatacggttttttatgcaagttgacaaaccaaaacaaatgacttatactcgcttcgtggaacttttaacatactccatgtgaaaattcctcacattcctggtccggcaaggccggtcagcatctggaaaggagatttatccaacatgaatgcacgaaatcaagaagtaagccattccctgtacgtctttgacagcaaaccgcctgtccgcaaggcccttcccatctcattgcagcacatcatggccatgtttttgggcacagtaacagtacccatagtcatagccggtgcagccggtgccgatgctgccaccaggaccatcatgattcagtactctctgatgatgtctgccctggccactatgatacaggtatgtcccctgggccccgtgggttccagactccccgtcatattctgcgcgggctttacctgtgttcctgtatttactccgattgcagcccaatacggccttcccggcgtgttcggcgcccagctcctgtgctctgttatcaccattgcgctgggcttttgcgtaggcagactgcataaattctttcccactgtggtcaccggcaccatcatcctgtccatcggcctttccctgtatcccatcgctttaaaatacatggccggcaatgccagttcccccacctatggccagctgaacaactggattgtggcctttgtaaccctggccgccgtcctcttcttcaacctgatgtgcaagggcgtggtcaagatggcctccatcctgctgggcgccgtggtgggatacgtgctggcgctgtgcatgggcatggtccattttgacggtgtggtaagcgccagctggctggcagtgccaaaaccctttttctacggtatgccgtcctttgacctgtccatggttctgccgatcctcttgattaccattgtcaatatcatgcagtccgtgggagatatcacaggcaccacggtaggaggttttgaccgggaaccccgcagcgaggaactgacaggaggcgtggctgcatccggaatcgccaccctggtaggcaccattttcggcgtgcctgtggtttcttccttcagccagaacgtgggcattgtgtccatgaacaaggtagtgagccgccgtgtcatcaccattgcctgcgcaattatgctcgcccttggcatcgtacctaaattcagcgcgctggtatccacccttccggccccggtcattggcggcggaaccctcattgtatttggtatgatcacgctgaccggactcaaattagtgtccagcgagcccttaaccgcccgcaacagtacaattgtaggcgtatccattgccctggccatgggactgtccaccctggaaggcactgcggccctggagaattttcctcccctggcccaggcccttctctctaaaccagtggttgtggcaggcgtcatgtccttccttctcaacctgttagccccaggaaaaaccgttgacgaagaagcccgggaacgcgctgccctggacgccgaataaccggacgcagccctatctacttaacacacacatccattcccgtccacctgctctccgagggctcatggattcccatttggtccagaatccgtgtcacaaagaaatccaccatctcctcaattgtccttggacgggagtaaaatccaggggacgcaggcattatgacagccccgtaacctgacagctttgtcatgttttccagatgaatctggttgtaaggcgcttccctgggtacaatgaccagggggcgccgttccttcaggcacacatccgccgcccgctccaaaaggttatgggatgagccatggcaaatggcggacagtgtacccatggaacaggggaccactatcatggcatccattccggaggatccgctggctatgggcgcgcctatggcatggacatcgtaatggtgaatcagctcctttgacccaaagatttcctgcagatattgttccacctccccggaaggggtatcctgcccaatctgccagccaagctcagactccaccaccagctttcccgcctgggtcatgcagatgcacacatgatggcctttctgaatcagcctttctatgacccgctttgcgtagattgacccgcttgccccggtgattcctactatgtattttcccatttgccatgctccttatcttactatttccttactggtaatcctttaagtccaccttgggatagcggacccgctccaggcatctgctctcctcgtttagtgtggcgtcaatccccatcttcgtctgtacgccccgctcgtcggaacagggatccagctcatgtccctgggcattgtggatatagaaaatatccctttcaggaatcacacggttggataccgcccacatcacgtctgcgggatcatagatatccacgtcctcatccaccacaatcacattcttaatgtttacatacgctgtcatggctgccagagccacatttttcggctctcccggattctttttcttcatctggacaatggccaggaagccgcttccatagggtggaatatgtacattggtaactcccttgctcacatactgggtatgggtcttaaggagaggctccctgggcagcacatttcccagattgatatgctcaaaggaggcgccgtttatggtctggtaaatggctccgttcctgtgggtgatagccttcacctgcaccatagggctgttccacggctcgctgtagtggcccgtgaactctcccagaggaccttccttctccctgtaatccggaagtatttcaccttcaatcacaaattcggccgtggctggtacatagatgtcggaagtgatgcatttcaccacctcaatcggactttttctgatagcgcccgcaatctctgtctcatccccgtcatagcgcagtccggctcccacatagataaccggatctgcaccgatgacaaccgcgatgggaagggctctcccctggctttccgcctggtcgtagaaatccttcaggtggcgccactcattgatcatgatgctgaacttatccttccccttcacatgcatcctctggaaggacaggttctggcgggttccgtctatctccttgctgacaatcaccccgcctgtgatgatggggccgccgtcctttggggcgtggatgggaaccggtatgcgttctaaatcaatctcatcccccatccgtatattttcatgacaaggggcgtccgccactacctgtggcttcacgggatgttccaggcaatctgccaggaaatccgtcatttcatccttcctgcagcccagagccagggcaatgccgtccatggatgccagcacatttccgcacacagagaattccttatccttgatattgtgaaataaaccggttctctggccctctgcctccagggtggccagcagggagccaatctcatacttccaatccactgcccgttctgtctcaaaaagcagtttgttatcctttaaaactgccagaaaatctcttaaatccttaatcccgctcattcactgctgcctctctttcttccaacgccttcttgccatattcccggatgagtgccatatcagccagcttgtttgccagcttcaaaagtcctcccatgccgatttcgtctgcgtcaacgccttcctgtccctggtccttggaccagatataacctccggcgtagccgtatacctcgttacagacaatattgattcctctcgccatcatcatgttgtgcatggcagtaatggtggcctcttctccgccgtttctggttccgcccacagcaaaggcactgccgattttatccctcatgagttccggatacacatggaacagaggccgcatcctgctgaaaaaagccgacagctggggagtgggtccataggcataaaccggggaaccgaacaggtacgcatccgcttccataaactccttcaaaagaggttcaaagtcatccttcagacagcaccatgtcttatttttcttgcagtatccgcacccgttgcagggcgcaatctttttccccctcagcgttatcatacttgtctctatgccgtcccttgactctatgctttttaaggcttctcccagagcatattccgtggacttatttctcgggcttccgctgatacctaaaatttttgccatattactctcctcatttcatctgtattctgtgattgtttctgcagatattgtctctgttgatattgtccctgccgatgttgtccctgcctctactgattctcctgtatgcaccttaccagatcctctgccatgagctgggcggtgttcagtatctcctgttcatctgccagaaggaacctgccttcctccataaccgtcttgccgttaataaccactgtgtctaccgccttatggtcccctgaataaatcagcgttgccacaatgtcatggaccggacaggactttacgctcttagccgggtcaaacaggaagaagtcagcctttttccccacttcaatggaaccaaccagctggtccaagcccagcgccctggccccttctatggtggccatcctgagcattccccccgccgtcatggccaaagggtctttgtggaaggtcttttgcagcagggcgccaaacttcatggcctctaacatgtcgttgtcattgttggagcctgccccgtccgtgccgattgccactgtaattccggccttcagcatttctcccacaggggccacgcccgatgcaagatacatattggctatgggattgtaggaaacagacacatggtttctggcataggtactgatttcttcctctccgatggcaaccgaatgtacagccagcaggtcagctcccagaagccctgattcctcataatggcggatcgcgctttttccgttcctctcccagctgattttgtcatccgttcccgtctcaaacatgtgcatcatgatgggtgtggcattccggtccgcatattccctggtggccttaaggagttccagactggccccccagccggctgccggagccagccacacgcggtacatgccgtccccctcaaattcttccttcagggcagtcacatcggcaaagacgtcctcggccttctccaccagctccttctttccgatatcgcggtagccccggccgtacaccattctgacgcccatgtctttggcgatatccagctccagttttcccagcccctttacaggctgcagctgcatataatccgccaccgttgtcacgccgcaccggatggcctctgccagtcccagcttcacgcccgcagccacatgcctctcccggagcacggcgcctgccggggccatggacttgggaaaccagtcctccagactcaggtcgcttcccattcccttcatgatatcctgatacaggtgggtgtgggtgttgataagtcccgggaacagataccttccctttccgtccttaagctcgattttaagttcccccgccttctcctctatgtaagctctgtcccccacatgtgtaatcactccgtcctcatagaggatacctccatcctcgtatatgcggtccagcccatccacggttacgatgtgcaggttgttatatccttctctcactgcagtgccacctcccttaccagtttattggtataacctctgaaaaatctggagaaattgccgattgtaaacgccgcaatcaatgtgccttccctgacgccgtaaatggtattcaggaaaatgagagatacgatgactgccagcaccaccagcgaaacatccactgcggtctttacattgccatattccttctggtactttacggaaataatcttaatcagggcctctcccggcatcaggatgacatcagccgaaaccataaatgcgatgctaagtccaaagaacatgcatccgatgatgagtactgccagtttcagtatataggtctcgggatggagtccccttacaaggaacatattgaaatccaccgcaacgctcaggaaaaaggtaggaatcagctgaataaactttgacgctgagaagctcttaaaatccacaataaattccccgataaagaacaatacatttaacaaaaacgtgtacatacccaatgtcagcagaggacatatctgggtcataacattggtaaggctgctcattggagatgttcctgttcctgatttgattatcagggagatccccgttcccatgaagaatattccaataagaagcatgatataacgccgggtcatctgtgaatcctttgcataattagtaccattagacataattgagtaacctccgctttcttttcatttggtttgcgtccgacccactgctctttccggaatttccgcgcggtacacatattatgtgtaatcccggagtctggcccttggccacgcttggcagtctggtcgtaagttgtccatttcccggcggatttctagaatagtgcgaccggcggaaatatggtgtgagtgtacactcctgtcttttggaaaaataatagtaatccgcgcatgcaccccgtccgctttcccctcccaattttattttaggacaaaaaaaacaacacgaatccgccgacctttgaaaaagaaaggtccacaaactcatgttgtacaaaatcaagccgaagctctgcacgcaactatttactccccgattatatcaatccaggagcaaaagtcaatattctagcaaaagaatatcgttattttacaataaaacagcgattttttaagcatattgcacaagtgtttttcataaaaccgatacaaaatcctcccgcatggggttaaagatatccagaaggattccagccttcctgcatacgcatccatgctccacgccgtccagctttagcatggtatctcctgccctcactgtttttttctcaccgtctatattaaactcaaattctccgctgaccacatacgtaatctgggtatggggatgatgatgaaggctgcccacagctccctcctcaaaggtattctccacacacatcaaatccttactgtaagccagaaccctcctgacaaccccgggacccgcctgaaccggctccgcattctcatgaaacacccatctttcatccagcatatcactgtctccttccatcattcaccgcagccgtcaaccgaatatcctccattataccaggccggcggtgctgtatagtccctgttattatactactctgcgcgccccgttacaacacctcaaattcacaattgagcacggtctgatatagttcctcctccgaccggctctcctccagatcgtgaatcagggccgttgtcttcaccatacgcatcagcgtgaccacagccggtatgtgctcctttccatccctgctggccagacagaatataacccgcgcctttttctccccgaataccacaggctccctggtaaccagaaggctcaggcttgtcttactaattccctccgcccccttaccgtgcaaaagggcaaaggaatcatccgaaacagcataaaatccctgtttctctataaagccaagcatattggacacataggattcctccacaaatccccgttttaccagaaggcccgcgctcatacggaccgcgtctttccagtcagacaccaggtccgccctcatgatgcagtcaaatttcaggaaactgctgaagctcttcgggctgtgaaatacctggacggtctgatatcccagttcctttttcaccacgtccataaccctggccctagtgttctcgtccaggaatcccagtttctcctcaatggagtaatagctggataaaagggatttcctgggtatgcccagccggtccatggcggctctgtcctcgctctgcagtatcggattcaccgtgaggcagggctttggcaggctgttgttaatgcggatggttgacagcacataatcaatggccgcccagtccgggtaggatgagagcttataaatagggagcgtgtccacaatatgtatctggtactcgctcagcagtgattctttcagcatggtggtggttccatacccatggccgcacaccagcagcaccttcttatagggtgctcccttcatcctccggatgctggccatgaagcagatggtcagatataccagctcatcctcattttccagcttttcaagggtgtccgtctccttgcagcactgctttacaatgcttagaaactgctgctcctcaggccgcataagggaactgacattgtcgtggatatccacatggttattgattctctgaatcaggggaatcatgtggttcagcagtccctccaccaggtttgtgtccttgtcaaagggcatgttcatccgctttgacatagcggaaatcagggaaaatgtcacctcctgggtatgcaccgggtccacctccgctgtaccgcccgccattttattggtaaagtcaaacatcttcgccatcattgccatatgttcttctgacacaggctttccgatgatggcccccagcttttctccgaaacgctgatacacctcccggtcatagtcaggcaccaccgtgatatccagaggatagtccttgtcatggagaatgaaccacaccagaaccaccacattcgacatataccacaggtaagagctgctggtcagggtgcacttaagctcctccagcagtccgtccaccgccatcaccacgttggcaatggagatgccctcaaaggccttatggatgatgtggatacagtaaaattcataggaattgtactccgtaaaggggtttatgaggtattcgatgtatttcctgaattcctggttcatcagggtggtgcgcttaagcttcgggccggacagataaaaatggccggaatacccgattcccattccgtccttcttaagcctttcatccagtgcagccatatcgttctttaccgtggagcgcgaaaccctgaactgcccgctgagctggttaatctttaagtcctcattcctcataagcaggatcagcagcagaatggacatccgctctttgccggtatagaccacctcgtttccgtcttccaggcccttaaggtccagggactggggatatcgcagcagccccttggagtgtttttctatctccggcaggcgctccagagacaatatgtcgttgatccggtccacatcgtagcggatgctccgctccgatatccccagagccttggccatctccttgtaggtggcctccccgtgctccttcagataccggataatgttcagcattctcccattaaacatctcgttcttctcctgtctgcatatgcagacaagaggagcgctccccactcctcttatctgttatcatatggtatttttatatgctcccctgaattccattttaccggaacgagccggaaatccgaccggaaattttactggaaagaatcgtgaatcttcttcatcaccgcgtcagacttcttaatcaggtctgacacgcccattttcaggactttctttcccttgaagcggtccagtccctccagggccacgtcattgaccaaaaccacgcacaccgcctcgtcaatgtccttctgctttaactggttctccactcctgcgccgccctgagtctcaatcagcacttccattcccagcttctcgccggacagctttaacgcctcagctgccatatatgtatgagctactcccgatggacacgatgtaataccaactaccttcattgtaaaatcctccttatccttttctaatctctatttattaccactagtcacttattataattcgtcaaatgttatctcgtccaggtcatccaggtccgtgtcatttcccgcggattcttccacatagttcttcttaagtaagtttaccataagtgcggtcacaaatccacctgccagcactgcaataaagtaccagatacggccttccaccaccggaagcacaatgagtccgccccatggagcatggtttaagacgcctgccaggaatgggatgatattgcctaccacggctcccacaatcagggacgggattacccttaaggggtcgttggccgcaaaaggaatggctccttctgtgattcccacacatcccatcagaatagctgcctttcctgcttccttttcctccacattgtacttcttgggtgccagcagggtagcgatgcccatgccgatgggcggtgtacagatagccacgcccacgccgcccataaggtagggaagcgtatccacctgtgtctgtgcaaagagggtggcaaccttgttgacaggaccgcccatatcaaaggcagtcatggctccgagtatggaggccagcggcaccttgcccacatcccccaggctggacagccagttggtaagtccgttcataatagcggcaatgggtccgccgattccccacacaatgataccgcctgttaccagggtgcccaccagaggatagatgaaaatggagcctaatgttttcagtgaaatcggaagcttgattctcttcagttcctttaccacaacgcctgcaattaagccggccgccatgccgccaaggaatccggcgcccatctcctttgccagatacgccccaatcataccgggtgccagacctggtttgtcggcaatggagtaagcgatataaccgcccagtaccgggacaaacagtgtcagtccgcccaggccaatctgcgccagacctgccagccagccggtctcaggtgtggctgcgccggccggattcagcatgactgccagagaaaaaaggataccgccggccacaataaacggaatcatgtgggatgtacctgtcaatatatgtttctttaaaatcttcagctgctctttcattttcttacccctccagaacttcttctaatatggtgtatacctgttccctggtgctgcttctcaaagactccctgaactcctcatgcataagccttctggaaagattggccagtatctttaagtgggtgtcccctgcctcgcttaagggcactgcgatgagaatgattaaatctgctgtctcacctgactcctcattccaaaccaccggttccttggtacgtccgaaacatacactggcctccagcacatggtctgttttgccatggggaagtcccatgtcaaatcccacaaaggttggggtaatcgcttcccttgccagtacatcctgataaaattcctctgtgtccgtgattttttgcgccctgtacagctcccctgacagggttcttatgatatcatttttactgccttccatatcgaatacgatacagttctcattaattaacttactcatcccttgcctccttccggttcttccggaatttgtcttttattctcttacctgtttgccgctgctgtttgtttcttcttaagcgcttaagaaaatgtgtccggcactgttttgtttctgtctgttctgtgccatcccttacatgcattatcataatcccggaccagatttttgaacagatagaagatttgcaaaaattttttacacaaatcaacaccggtacagaaatacatatgggcgcgaacacaaacaaaatcacgaacgcaaatcgaaccgcacacgaaaacagggccatgaaagcggacgcggttccgctgcatgaccctgtaactcatgattatcaattctcacagacctggaaatgtaccttaccgccaggctgattatacctcctcaaatccaacagaatggaggaatccggcaaatgccctccgtcccctctcatcgcatttatagacgcctgcatcctccaggacccgtgcaaacacctttcccacttcctcctgcagaatagaccacacattatccctggtcaccaggatgcccttttcctgatatccgggcatgaattcctccacccagtcagcgtgtttcagaaggacctcatcctttcgtatatcctttccatccaccatgtactctcccagcattgccagttccgtcttaagcctggaaggcagcacggccagtcccatgacctcaatcaggccaatgttctctttctttatgtggtgcagctcctgatggggatggtatacgcccagcgggaactcctcagtggtaatattattgcgcagcaccaaatccagttcaaaggtatccccaacctttctggcaatgggcgtaatggtgttgtgaggctctccgtctgtctcggcaaagataaatgcgtcctcatccgtatatcctctccatgctttcagaacaacatcccccagctcaatcagcctgtccgggtctgctgcccgaagtctcagcacggacataggccagaatacgattcccgcttccacgtcctcatacccttttatggaaaaatgcttctctatgggcgcttttgccatggcaaaggtataatgccccccctggaaatggtcatggctcaggatggatcctcccacaatgggaaggtccgcattggaacccaggaaataatgggggaactgcttgataaagtcaaacagctttctgaatgccgccttatcaattttcataggcacgtgctgtccgttaaatacaatgcagtgctcattatagtacacatatggggaatactggaatccccactgactgtcattgatggtaatgggaatgattctgtggttattccgggccggatggttggtccgccctgcataccccacgttctccatgcacagctggcatttgggatagccgctctgcctggccagcttggccgctgcaatggcctttggatccttttccggtttggacaggtttaccgtaatgtccaacgtaccgtagcgggtatccgtggtccacttcatatctcttgcaatgcggtaacggcggatataatcggaatcctggctgaaaccataataccagtccgttgctttctcaggagactcctcatagcgtttccagaattccttcaccacctcacccggccttggcatcaggcagttcatcagcttcgtgtcaagaaggtcccggtaaaccacgctgtcctccttaagcacgcccgtgccggcagcgcagtccagaagctcctttaaaatggcctccaaatccccgctctccaccggaccctggggttcttcatactcatccattcccatcacatccaggatttggttcctggcataaaccgcgtccgcctcagatatgagccccttatccaggccgtactgtaccaatccctcaaccgcttcataaaccatagaaatatcctccctgtacacgcttccatctaagcacagccacataccgctgttttcttccattatatccctcacgccccgcaaccacaatgcacttttttacttttatatcctgattttcttaaatagtgcgaaacaaacggtttacccgccccaccagaattcctcccaaaaggccaatcagggctcctgccgcgcagcctgctgtcagcagcaccggcagataggaaaacacaccgaatgtattcaccacaaaagccgccatcagaaactgtccgatattatgggccactcctcccagtatgctgactcccaccatcccgaacagcctgaaccgtttgcacagagccatgacggtaaggctcagggcagttcctgcgaggccaaacaggatggccgaaggcggcccgaacaggatgcctgataagagtacacgcaccacgctgataagagcagtctcctttgttcccatgcagtaaagccccaccatggttaccagattggccagccccagcttcaccccgggcgctcccagatataccggcaccaatgactccacgtatccaagcaccagcgccagcgctgtcagaattccaaaaagggccgcattttgggctgaagttctgcgtgactgtttcgtaccccggcctttcctcaccgctgcagctgattttttatatgattctgtaaccgtctttttctgattcggcatgtgatcctccagtcttcatcgcggcatttcatccttttcctgtgctctgtcctcagcacgcatatagtataccatgcataacccaaatcttccatagcgccttaaagcatgtacggcggccatatgacctgcttccgtgtgtaaccgtggacaggaatgaattaccacctgtgcctgtgtgaaaacgtattgtatgcaatggcttattgtgataaaataaacaatatatcccaccccagcgccgtccgcgtatattccgctccggcgcatactactatatttttaaaggagtgttttccatgaagagaagtaccatcagctccaacgccagaagtttgattggcattgcagtcatggcagtgttgtccttagcggtaattgccgtatcagaccctttgtataaggccctaagaggacctgtgaccacggccagccccgaggcgcccctggccgacgggatctatacccatgaagctttggaaccagacgcaaacggctttcgggacagaactaccctgaccgtatccgacggtatcatcgtatcctgtgtctgggattcctttaacagtgacggagaaagcaaacagaagctttccatggaaggccaatatatcatgacagaggacgggcctctgtggaaagcccagtccgacagcgtatgccggtacctgatagaacaccagcgcctggccggcgacgacggatacaccaccgatgccgtggcctcagtcagcatcaacgtatatccatttatgaacggagtggaggaatgcctgcgtcaggctgaaatcaaatgaacatattacagaaacgggacgtgattctggctgctgccatactactgctggcagcggctgcctttggcatcagccactatatccgccgcacaccggctgccattgcccaggtgtctgtggacggaaccgtagtggaaacactggatctcagcaaggatacggagataacagttacatcctccaacggcggcaccaaccacctgatagtaaaggacggtgaaatctggtgcagcgaggccagctgccctgataaggtatgtgtccaccaggggaaaaaacatttaaacagcgacactattgtgtgccttcccaatcagatgattgtaaccataacaggcggggaataaatcccccgcctgttctatttatttcttccttctatgccctaaactatgtcctaaaacttcttagccctgcccactccggccagggctgtcctgatatcctcaaagctcattccgcccacggaatcaatggtggcaaccacggcgccctccaccagaggacaatccaccatctccaccttctttccctcgaacatctcaatgaccatctccgtggtcatgacagcgcttcccaaatccaccaggacaaggaccccgtcatcggaatagacagactcaatggctgcctgtatcttctcaaagctggttccaaaaccgccgccgtccatgcctccggccggcgcgatcctggcgttgggcgccatgatggaagtcagctccaccacactttttgccagattctcactgtgggacacaatcacaaatcctaccatatgtactactgctcctttcagccggacaccgatgctctatgccggattttgtatccggtaccggtttccgatatctgtctctataccagccccgcaatgacttccagcatataggaataagaggtggctcccggatcctgatgccccagtcccctctctcccacataactggcccggcctttggtagctaccagatctttggtgtgctctgcgccggcccaggctgccctgactccggcctccagcgcttcccgtacgctctttccctctgccgccgcgtccttcatggttttcagggaagggaccatggcatccagcatggtggcttcctccacagtggcctttcctctctgctccactgcctgtacagccgtatccatcatagacaggaaatcatccatatccatctcttcctttcctgccagggccatgcctgccttcatataggccgaaccatacagggggccggaagcgcctcccacagtggataccaatgtcatgcccactgttttcagaatggtccctatatcctttccctccaggtcaggaagctttccctccaccgctgcaaatccccgcgccatattaatgccatggtcgctgtctccaatcggctggtccagctctgtgagatactccttctcggcctccatcttcagaccgattgccctgatgatttccaatacttttttactgtctgccatgatgacccacctttcatttcaatttatttttatgacctcagaaatgcctgttacttccaggccggcgtatccgccggggcatccaaaagctccttcagctggtcatccagcctcagcagcgagatggagaaaccctgcatctcaatggaagtcatgtactctcccacaaaggtcttataaaccctgattcccttttcagccagaacatccgagaccctgttattgatgataaagagctccatgagaggtgttgagcctgctccgttgatcatcacagccacctcgcggccctcatagtcaatgtctcccagaatctgtgccagaagcatatccgccacctggtccgctgtcttcatggactccctgtgggttcccggctctccatggatcccgattcccacttccatctcatcatctgacagctcgaatcccggctttcctgccgcgggaaccgtacacggcgcaatggctgcacccatggtccgcacgttgtcgattaccttctgcgccaccgcatggacctcgtccagggaagcccctgtctccgccatggcgcctgcgattttatgtacaaacacggttccggccacacctctgcgtcccactgtatacagactgtcctttaccgccacatcgtcattggtcaccacatacttcacggtgatgccttccatctcagccatctcagcggccatctcaaaattcatcacgtcgccggtgtagttcttgaccaccataagcacgcctgcatccgtggcaatggccttgattccctcataaatctggtccggggtaggcgatgtaaacactgcgccggccacagccgcgtccagcatgccgcatcccacgtatccgccgtgagccggttcgtgcccgcttcctcctccgctgatcagggccacctttccttctttcttattggctctgaccaccacattgccgcagtccagttttctcagataacccggataggccttaaccataccctgtatcatctgatcctctaccagcgccacatcgttgataaatttcttcatatcgcgtaaacccccttttatttaataggctgcaccaaatgcgggcagcggtttccccactggttcctaaaccacgtaaagcaggggccgccatttggagcgccggacggattcatacccgtctgcgcgcccctcctgtaagcctctgctttccgttctttctgttactcgcccagacagttcatgtcgttgaggccgcaggttttgtcctcttcctcctcgacacagttcatgtcgttaagtccgcaggtcttatcctcttccccttccagacagttcatgtcattgagtccgcaggtcttatcctcttcctcggtaattccgttcatgttattgatgtccagtttcttctccatttagagccctccttcttcttcggacagcgccccattctgccggtacgccatccatcaaactacagtaagccggcggccgccatatggcagctgccgaccgaccggcgcgcccctgctgattcaaacggaaccatattcctgtcccgcctccggcaggagcacacaactatagcacttccttggtagccactatatcaactcccgtaccggccacgtctgccacgaccacatctccgatgcggatgggagccttgacggttacgccctttaaggcctttacacactggaatatcttatccttgggtatatcttccctggtcttgacagataccatgtcagcccgtccgccttccacccttacagtggaggtgacgattcgggtcggattcgttacttccttgcgcgcatatgtctcgcccttcttgcatgtgtaccctgtgatggtcttgatttccccgttttccagttcaacggtcagaggacaccccataggacaaccgatacagataagttctctcttttccatggtctatgcctcctctacctttattgtaatcttcttaagaccgggatgcaacatcaatttttccttctggagctttatctcctccatctctccgggcgccataaccggacgtttcctgtgcataacctgctcatcatcaaagtatacgccgatatagcagtttttataaacattccccacacggaaacgcacgatttgggtttcctccatgcggtccggatggatggtgcagggcaccgtatagcgcaccccgtccactgcgcttaactctatctcctgtcctgttccggagcacctgccgtccttcacatatctggccgcgttcttacctgccgccgctgcctcctctgacacaaaatccaccaaatcatggacgtggagcacgttgccgcaggcaaatacgccttcgatattggtttccaggctttcgttcaccaccggccctgatgtgacgcggttcattttcacgcccattccgttagacaattcattctcaggtatcagtcccacggaaagaagcagggtgtcacaggtataatcctcctcagttcccggtatcggcttacccttctcatccacggctgccagggtgattccctccagccgctcctttccccgtatgtcaaccacggtatggctcagcttcagcggaatgccgtaatcgtccagacactgtacgatattacgtttcagtcctccggaataaggcatcagctccgccaccaccttcaccctggcgccctccagggtcatacgcctggccataataaggccgatgtctccggatcccaggataaccacttcccgtccgggcataaagccctccatattcaccagacgctgggccgtgcctgcgcagtaaatgccagcgggccggtagcccggtatgttcagcgcccccctggagcgctccctgcatcccatggccagtataaccgccctggcctgtatctcaaacagcccctcttccctgttcatggccgtgaccaccttgtcatggctgatatccatgaccatggtgtttagcttatattcaatcttcctctcatacacctgttcctcaaacctggcagcgtactccgggcctgtcagctcctccttgaatgtatggaggccgaatccattgtggatgcactggtttaatatgcctcccagttccttatcgcgttccaggatcaggatactctctatcccgttatccctggccgctacagctgcagcgagacccgcaggaccgccgccgattatgacaatatcatattccctcatcttgcgcgcgcccctttctatattctgtccttgttggttcccactacaagctttgaatccccgccggcctttgtaatctccgtcatgggaagtcccagctcgcggtgaagcagttccatggatctgggcgtgcagaaccctgcctggcagcggcccattcccgccctggtcctgcgcttgatgccgtccagggaacgcgcccccaggggcctgtggatggcgtccaggatttctccctctgtgaccatctcgcagcggcagatgatatttccgtaagcaggattctgtctgatcagctctgcctgctcctcttttgtaagtgtatccgggtccagaattcccttgcggctgccgtcaaactgcggatttggctccagtcccagcttttccttaaggattccggccaccatccttccaatggcaggacagctggtaaggccgggcgactcgattcccgcgcagtctacaaatccgggcgcgtcctccagctcttttataataaactcatgatgatcctcatgggccctgagtccggcaaaggatgtgataacctggcgcatgggaaggtcttttacgttcatccctgcttttgcaatcagttcatccagaccttccctggtggtggctgtggcctctttgtcctcaatgtcaatggctgtgggccccacaatcaggttgccatgtactgtaggcgataccaggacgccctttccatactttcccggaagggcgaatatggtatggctcacatgatttcctgcgctcttatctaacagacagtaatctccccttctgggggttatgtgtatctttgttccgctgaccatgttgtggaacttatcggcatggactcctgccgcgttgaccacacagcgggtctcatacacaccctggtttgtttccagagcccatccgccctctatcctgcggatatctgtcacctcagtattaaatttaaagtccacgccgttggtataggcattttccgccagcgcaatgttcagattaaagggacatacgatgcctgccgtaggtgcatagagaacgcctgccgcctcatctgccagattgggctccatttccttgattctcgccttatccgtgatgatttccaaatcctttacaccgttcttaactccccgctcatacagagctctcagatccggcagagactcctcgtccagacataccacaaaggatccgcagggattaaagggaaaatccagctcctttgccagttcaggcatgatctggtttccttccacattcagcctggccatcagcgagccttcggccgcgtcatatccggcatggacaatggcactgttggccttggacgtgccgcagcacacatcctcctcccgttccaggacacaggcattcaccttataccgcgacagctccctggcagatgcagcgccggacacgccggccccgattattattacgtcatacatatgttttgttcccttccttctttttttatgaaaatgccggttcctcccggcatcttcctgccgccgccctcaccgggccggccatttatcttaaatccgccggcctggtttaaaacagccagccgggcggccaacattcagccccgaagggttaaaaaagcggagcaaacaaggcgtgtttccacacccatttgctccgctctgttctcacgcaatcaatattcagttcatactaaacattacatccacggaattgcctgatacagtaaagctgccactactgcgcccacaaccggcccgatgatgacaaccggtgcatagccccagttggaatcgcctttgcccttaatcggcaggacagcatgtgcaagacgtggtcccaggtcacgtgccggattgatggcataacctgtcagaccgcccagagacataccaatggatacgataattccaaatacaagcagtttatccacgcctggtgcaatgccggatacctggccgatgcctttgattgcaaatacaagcacgaatgttcccactgcctcgcttaaaatgttgcgtcccatgttaggaacggatggtcctgtacagaaggtccccagcttggttgccgctgactcggttgcgtcatactggtccttaaacagaaggtatacaatgacagcgcccacaaaagcaccggcaaactgtgccacaatgtatccgggaacaagtccccatgacatacttccatccactgccagggcaatggtcagcgccggattaaaatgcgcgccggatgcagcgccgaagatgaacgcgggcagcataaccgcaaggccccatgcaaaggtaatctggatggaaccagcccccttcatgcctgatttgttgagcgtcacgtttgctacaacgccgtcacctaagatgatcagtatcatggtccccaaaaactctgcaatatatggtaacatataataacccccttatctgtatggcatggctccggcccctgtgccaaggggcgccggaggccgggcagccatgctgaatcacattgtttcatacccatatctgattaatcttcttttgcccatccgtaagagcatttcacggccttgttccagccggtcaccatctctgtcctcttctcctctgaaatctccggagtaaaggtgcggtcgatggcccagttcttgataacctcttccttgtttgcccagtatccaactgccagacctgccagataggcggcgcccatggcagtggtctccacgcactgcggacggttcaccggagcattgataatgtctgcctgggtctgcatcagatagttgtttgcgcttgctccgccgtccaccttaagggctgccagctcaatgccggaatccgccttcatggcctggagcacgtcgttggtctgatagcacagggaatccagcgtagcccggataatgtgatacttgttgacgccgcgggtgatgcccacaatcgtgcctctggcgtactggtcccagtggggggcgcccagtcctgtaaaggcgggaaccacataacagccgttggtgtcctttaccttcttggccatatactcggaatcaggcgaggaatctataatcctcatctcgtccctcagccactggatggcggcgccggcaacgaagatggaaccttccagagcataatttactttgccgtccaggccccaggcaatggtggtaaccaggccgttcttggagaataccggcttctcacctgtgttcatcagcataaagcagccggttccgtatgtattctttgcctcgcccgcattgaaacaggtctggccgaaaagcgctgcctgctggtcgcctgccgccccgccgatggggattgggccgccaaagaactgcggatcggattcaccgtatacgaaactggatggttttgcttccggaagcatgcacttcggaatgtttaactcggccagaatctcatcatcccactctaatgtattgatgttgaacagcatggtgcgtgatgcgttggaataatcggttacatgtactcttcccttggtcagtttccagatcagccatgtctccacggttccgaacagcagctcccctttttctgcgcgttccctgactccttccacattctcaagtatccatctcagctttgttcctgagaaataagcgtcaatcacaagtcctgtcttggcacggaaggtatcgaccaatcctttctccttcagtgtatcgcagtactcggaggtcctgcggcattgccacacgattgcatggtatacgggctccccagtctccttatcccatacaatggtagtctcacgctggttggtgatgccgatggccgcgatatcctctgcggttgccccgattttggacatagcctccactgcaacgcctaactgtgtggaccagatttcattggcatcatgctctacccaacctggcttcgggaagtactgggtaaattccttctgagcaacactgcacatttcccccttttcattgaacaggatacacctgttgcttgtcgtacccgaatccagtgccattacatactttgccataaaaaaccctccttcttgttgttctgatacataccatatgtatcatttatacataaacccattctccttccccaggagagcggacttaagtttctaatttcacatcagccatactttctgattcgttgtggatacggatatggccccggctgacagggcggccatcacgtcctccttgtctgatataagtccccccgctatgacaggcaccttcaccagtctgcacaccctgcgtatcaccttgggcatgagtcccggcagtatctctatgatgtcgggcctggccacgctcatctgtttctcgatgttttcaaaagccatggaatccaatacaaagacccgcagcgtggtatacaaggacagctctctggcccgttttatcagggccggctttgttgagatgattccgtccgcactggtattattcctgatgaaatctacagcaacctccttgctgctgagtcctgttatcaggtcaatatgtaccatggccactttgtctgacgctttaatctgttcgacgatggcgctgatattgcagatatccccaaaaaggatgaacaccaccttaatctcatctctctggcagcaggcgtcaagaccctccatgtccttcaccgctgctatgaccggattggcttcaatcaggtcatataatttctggttcatcggtatcccccctcacataatttcaccactaaaaagagcatagttctaaatcaacatttctgtcgtttcactatgctctcatcatctcagcaactttattcgtctgtctttatctgttttcaatatagcacattgcacatacaaattcaatagaggattttcttttctcacataatgtacaattttttatcaatttgagcactttttttattagtatttaacaagtttttaatggagttttaccattttttagttattattttaacaaggtgacgatttcgtctatggtcttgcttcccatcacaatcctgctgtcatttagaatcatcataggcacccgcttaatatcatattgggctaccaggtcctcataaagggccgcgtcaatcatttcagcctcaatattcggattcaggaacgcaatctgctggcaggctgtcactaccaaaggacagtgatggcaggcaagggacacgcagatcttgatatttgtcttcttgtccagccgttggattttctttctggtacccttcgccacctcctgtcccggccctgccaggttatagacagccagcacaaaggagttgatttccctgcctcccggcaccccgtgaaacgcagcccgtccgtaggccccatccttatacagtcctgttacgggcagccacgccgtattcagttccggcacctggtccgcctcatccggtccgtataactccagctcaaggttaggacttacagagacgactgccctgagaaaggaggccatctcccggtccttttccccggacagatccaccactgccctgattgtcactcttttctccattctgccgaagataccggccagctgcgtcttaagcccctggtccaccagactgctttcttcgggaatcgtatttaaatcaatcgtaacatccacctccctacagcattcccaccaaatccaggctgggtgtcagcgtctcttctcccggtttccactttgcaggacatacctgatctccatgttcctccacaaaccgggcagcctgaaccttgcgcagtagctcctgggcgttccggccgattcccatgtcatgaatctcatacgccttaatcttaccttccggattcaggataaaggttccccgaaatgcctggccggcttcctcatccagcacgccgaactccctggccagcttcccggccgggtctcccagcatgggatactgtatttttttgatggtatccgaggcatccgcccatgccttatggacaaaatgggtatcctccgacaccgagtaaatttcacacccggcttccttgaattcctcataaaaatcagccaggtcccctaactccgtgggacacacaaaggtaaaatcagccgggtagaaaaaaaatacagaccagtgccccagggtgtcctccctggtcacatccatgaacttcccctgataaaacgcctgtaccttaaattccccgatggtcctgttaatcagattccccataaaaatgctcctttctccaattgttgagacaacaactccggtttatccgtaaatatactgacttttctgagtatcagtttgattgtagcacaagtttttggagaggacaagggggtgtcagcgcccccttcgcatctgccgcaccagcttctttgtttctttgtccacgcggaaggactctgtgattttctggagcgctttattgtaggtccagtcgtccaggctgctctgcttcagatattccattacctggtccgggaatttgacgaaatagacggagacagcccaggccacggccattttggcatagtaacccggatgacggacgcggtccagcagttttagggcgcggtccagatagtcctggtctgtgtaatgggataacagcatgacggttccgaaacgcaggtcgtattccctgccggattggaaataaggctggatgaactgccagacctcttccctgtaacggccggtgattttaagggagccgcagaatatatcgcacactgcccagttattgatggccgggacaaaggcggttacgtattccccggccgtgtcccagtcacggcagcctccgcagatacacagcccccagattatcatttcgtcgtagagaacgccgtctgctccctggcccttttccttccaggcacacgatacctcttttatgtactcctgccatccgctttttttcaggtctttcgcgataccacggagttccggcgtgcgcactcccatgatgccggtgattcccggcagaagccggctgtggaattcccggtattccgggtctgacagctcttccagtttttttcttacggtttcacgtatggttggtttatctggcatattaatctcctggtttaaatgataatggtttgctggctcagagcgtgtctgagcagttcctgccgacacgctttagagaagaaattcactgagtacaaagttgcttacatccattccccactcggtcagggatatccagacaccctcgcgctttaaaagtccgtccccaatgagacgctctattacaggcccgtatacgccttctattttgaccccgaacatggatacgaagtctatctctgatatgccctttgtcatgcgaagccccaggaacatgaattcctccatctgggcttccctggtcagctcctccacagggcctctgagaagggcaagggctgaggatccgccttcttcggaaaaatccaggtgcagataggtgtccaaatcccgttcattggaaaaacgtgttccgtttatgcaggaggatgctcccagacccaggcccagataaggtacttccctccagtaaccggtgttgtgcaggcactccctgccgggcttggcgtaattggatatctcgtaacggccatacccctgctcagccagaaaggtcctggtaaaatgatagatgcggttctctgtgtcctcgtccggaagggcgggataaagggccgctctttttctgggaagaggagcctgctctgtttggccgccgccccgcgggtgcagaaaacagacatcatctgttttaaggccggtctcctccccttcccgctttccgtaacggtcccagaagggtgttccctcctccacaataaggctgtatgcggatatgtgctccggtttcagcatggtcaccttcttaagggtattcttccagctctccagtgtctggcccggaatgctgctcatcaggtccacattcacgttggtgaatccggccatgcgggcgcactggtagcttttcaggaattcctcaaaggtatggattctccccaggtccttaagttcctggttgtccgcggactgaaggccgatgctcagccggttgattcccgccgcacggtagatgtgaagcttgttctgaagcagggtgccgggattgacctctatggtaatctccgcatctcccgctatgtcaaaattccggtttaaagcctgcatgatatccctgataagacatggttccataacagaaggagtgcctcctcctatgaacacggtcttaacctggtattcacggcagcaggcaccctggacttctatttcccggatcagttgttcggtataagcctcatgaacagacgccagcgccctgaaggacaggaaatcgcagtaaagacatttcctggcgcaaaagggcacatggatgtacagctccaggggctttctctgtaagtttgtcatcttatgatttatcccacctatttattcgtcatccagcttcagcacactcataaatgccttctgcggaatctctacatttccaatctggcgcatacgtttcttgccctccttctgcttctcaaggagttttctcttacggctgatatcaccgccgtagcacttggccagcacgtccttgcgcacagccttcaccgtttccctggcaatgatcttgccgccgatagctgcctgaatcggtatctcaaacagatgtcttggaatctcatccttcagcttctcgcacatctttcttccccgttcataggcggaatccgcatgtacgataaaggacagggcatccacctcttcacggttcaccaggatgtccagcttcaccaggctggaacgctcatacccctttaactcatagtcaaaggaagcgtatcccctggaacgggacttaagggcatcgaagaaatcatagatgatttcatttaagggaagctcatatttcagaagggcgcgggtcgtttcgatatattccatacccaggtaattgcccctgcgctcctggcagagcgtcataattgaacctacaaattccgtggttaccatgatttccgcactgacaatcggctcctccatgtactcgatttccgtaggatcaggaaggttggacggattggtcagctccatcatctcgcccgtggttttatgcacccggtacacaacgcccggggccgttgtcaccaggtccaggttgtattcacgttccagacgttcttctatgatttccaggtgcagtagtcccagaaaaccgcagcggaatccaaagcccagggcaatggatgtctccggctcgtagaacagggaggcatcgttgagctgcagcttctccagtgcgtcccttaagtcattgtacttggcgccatccgccggataaagaccgcagtataccatgggagtgacctttttataaccgggaaggggagatgcgcaggggttgtccctggaagtcaccgtatcgcccacacgggtatcccgcacattcttgatgctggccgtgatatagcctaccataccggctcgcagctcctcgcagggaatgaactggcctgcgccgaaataccccacctccaccacatcctcctcggatccggtggccatcatacggatgggggtccctctttttacggtaccctccatgatacggcagaatataataactcccttgtaggaatcgtaggtggaatcaaagataagggcctttaaaggcgcctgcggatctcccttgggagcaggtatcttgtggactatggcttccagcacttcttctatattaacgcctgtttttgctgaaatatgtggggcgtcgctggcatccaggccaatgacgtcctcgatttccgctgccacccgctccggctccgcgctggggaggtcgattttattgataaccggaaacacatccaggtcatgatccagggccaggtatacgttggccagggtctgggcctcgattccctgggaggcgtccaccaccagtatggcgccgtcgcaggcagccaggcttcgtgatacctcgtagttaaaatccacatgtcccggcgtgtctatcaggttgaaaatgtactcgtttccatcctgggccttgtatacggtacggactgcctgagacttgatggtgattcccctctcccgttccaggtccatattatccagtacctgctcctgcatctcacggctggtgagaagtcctgttttctcaataatacggtcagccagggtggacttgccgtggtcaatgtgtgctataatgcaaaaattgcgaattttactctggtcaactgttggcatgctttatcctctttctgtggtatttcttcaccggaaacttgcgtacatccatatggaaaacgcttccgttcgcttactgaattatactatcttttctatttccttgcaacaccatatccaaaagttctgacaggggctccatggcgtttaacgcctcctcatacgtgtttgtctgggcccccacctcgatcaggctggacttggggcgcaggtgttcattataccggaggcccttaaggtatatcttgcgggtaaagccgggataataggcggcggctcccagctgcatctggaggctgaatgccaggttatcctcccggtacggattctgcaggtactcaatggggccctccggtgtctggctcagcccgttaaagaacataatctgcgccgtatccctgccgtccacctgggtgaccagatgcaggttctcccccaccccgtccctgtggatatctaacaccacctcgatggaaggattctgctgcagtatgttggtgattccgtccagggcataattataagccttgctccggtccagctggccgtttttcaagtcataaaccgatgtgtcgtggtatacattgtaacccttggcttccagaagccgggtcaggtaatcccccacgcccaccacggtctgtcccgggccggaatccttataggcttcctgggaatgggtgtggtagataagtatctggggcttggaatcatcccccttcatggtcatgtcacggctcagcagatccttggcattcatcaggtcacggcccgccgtggtggaggtgtggacactgtaaaaatgttttatgaggaaatcgtaatccatcagctgttccaacacatatgtattgccggtaatggggcgctccagtgtccccgttatggtctccagggactggtttggcccctggtatccggatgccgtacctcccgcgccggctgccaggtcctggctgctttctgttttggcaccacccgcaccgccagctcctccgccccggacagtttcccctccctgagcagttcctcctgcgcccgcagcggcttcccctgaggccaggactcccggttcctccagtgtctgctggccggattcctcattgccgtaccaggcaagatactggtgttcttcataaaatgttttaaccgcgttgtatttacggtaagcaggatccgggtcattgatagccccggtgcttccccaggcatccggccatgagcctgacatcccggcattttctgcgggatgggcctggttccatatggcttccaccagccattgaccgcctgcgcatatcatatctttgtaatcactctttgttatgcttccggcggcccggctgatataccggccgcacaggagcataagcagtataaggaccgtgccggtcagaaaccggcgcatgagccggtccacgcctccacgtcttattctcatcaattcattcacctgtcatcatactattattatgatatgcaggaacgtggaggatattgcttgtttcgtaaccttacggaaaaacagcctgatggatgccctcggatatggtaaagcttaactgcttcacggactggtcaatgtccggaggagtgacataaagaggaccgaattccggctccagtaactcccgtataagctggtactgtccgtccgggtccatttcctcgatccagctcccggttcccctggtaccctcattttccgccagcacccccacaagggcggagacggtatcgtgaacaatggccgccgcccccaccacggtgggaaccccaatggccatcaccggcactcccaagctttcctttgtcaggctgtggcggtgatttccaaccccggagcccgggtggattcccgtatccgtaagctggattgtggttcccagacgccgcacgctcctggctgccagggcgtcaatggcaattatcaggtcaggatgggtttcatgtatgattccctttaaaatctctgccgtctccatgccggtctgcgccatgactccgggcgctatgccgctgatagcaggaagtttcctgtctttcaggaaggtgtttccgtactgtccgtccagatgccttgttacctgcaggttatccagtacccggggacccagggaatccggggtgacggaatcatttcccagccctaccaccaggaccgagggcaaatcctcctccctgtacccaatcatctccgccataagcctgcgtatctgatgcgccagttcttccgatatctcactgtggtaatcgtcatccgccttggacagccggtctgcctccagagtaaggtaggtacctctgggctttcccattgatttggctccctgttcattcagtatttttacctctgtcagttttaagccgctcttttggtgatgccattccttcagccggactccggatacgtctcctccttcgcccatggaactctcacgctgctccagcgccaggtccgttctcacctggaaggtaccggccgcagcctcattgacagcgtttacagctgcattttcctccatattcatccacctcacatatcattctcccatcagtttctgcgattatggccggaaatatgtatgattggatttgaaagagtctgttttcgattggggatatgattgcagcagaaaaatcccatgtcaaatgtcatgtcaaatttcttcaaaaattcgccaaatatgacttgacattccgggtcagattagctagaatacaatagtatgtttacattgaactgtccgtgtccaggctttgatggaaaacacaaagattataatatgaagaacggaggtgtatttcattggctaacattaaatctgcaaagaagagaatcttagtaaacgaaactaaggctgcaagaaacaaggcgatcagatccaaggttaaaactgcaatcaagaaggttgacgctgctgttgctgctggggacaaggctgctgcccaggctgcactgctggctgctaccactgagattgacaaggctgctaccaagggagtatatcacaagaataatgcttcccgcaaggtatcccgcttatccaaggctgttaattccatcgcttaatttatagagatattcattgttaaggaatttcagacactcttccttccggcccaacccaccgggaggatttttttgctttaaatacagctctgactccccattttatacagtgcataaaatgaggattccggcccatactatcatcgaggtgatagatatggcatcctatgtttccccgaaaattcgggacaaatttgaaaccctttccgttgacttaaaaaactgcattctggagcgcaatgtacacctggaaacattgcaggacctgattaaggttctggatgaaatcgtgaaagagggaagctgacagcatccaaaggaggcagaatcatgaatcgtaccatgaatgaggatacagcggaaaacagggactgttccaacgatacggaccatgtgaagaaggacaagggcgcttatgcagagcccctgccggaatctttcaggccgcgccgtgacggccctggcggagagtaaggctttaagagggaaaaatcccagacagataagcggctgcctgctttggctgcctgcgtttcctgcctgggatttttcacattttattccggataccggttttacatattggcacaaacctattatttcacatacttaatataggtcagagctgcttccagacatccttccacgcctgccagtccgctgttgaggcagatatcatatgcatccatatcaccccactgggtggtggaataatattcatgatatgccttgcgcctcttgtccactgccaggatgctggccttggcctcctctctggtgagtccgggattcagggacatgatacggttaatacggttttccatatctgagaatacaaagatattaacagcgtccggaagtatggcatctgcacagcgccccacaataacgcacggccccttgtcgttcaggttgcggatgacggttgcctgggccgcataaatgcgctgggtcatggcaatctggtagtccggcggaacctgccgcggtgaataattatcaaaatccgggtccacctcatcgttggcctctaatacggaagtctcaatatttccttctttcgcaatcatggctatcaattccttatcataaaaaggaattcccaatctccgagccagtttttcgccaatctcccgtcctccgctgccgtactcgcggctgattgtaattgctctgttcataaccatacctcctcatatcccattttcatattctatgtcagtaaccggctgcggtccttacatattctcctcgtcgtagcgggctctgataccgccgataaacttaggtctggtcctggcgcataccacatgggcgcttcctatctcttttgtctttatccgcacagggactgccacgtccttcatatgcatgccgatgagggtatccccgatatcaattcccgcatgggccttgatgtgctccactgccacggggtgttccagagtggcatacgcagccgtggcaaaagaacctccggcctttagctggggaaccacattcacctgttcatagccgtaagcctgagctgcctctgcctccagaatcagggcacggtttaaatgttcgcagcactgggcagccagatagattccctttggctttagttcctggtaaagagccgtatacacagccatccctatctccgcgcttgagtgggatccaatcttgaagctgtctatctcgctggatgaacagcccaccaccagaatctgtcccggcttcagacgggccgcctccataagctcctccagcacctgcctggcctgagcctttaaatcttccagttcaattgtctccatcatatccatcgccttcattcctcttttttttattcatatttgtttgctatgagcagttccaccgccagccggtcctgcagctttccggtcttaacgccttcctctgcatccacacagagattcacataggacaggatctgttccctggtaaatgtcttggcctgcagcatgatttttcccaccacaaagggctgaagcttaagcctggacgctatggtgcttttatccatcccctttcccatcaggtccttgacctgaaggatttgattaaactgccttgctatcagaaaaaggatgcgcatgggcggttccttcagtgtcagaagatcctcatagaggtccatggccttgcgggtctggcgtgccgctatggctgttatcatgtcaaatattttattggttacctgggtggtgcagatggtctccacgtcctcatccgtaatcacctcgcggcccagagtatagcttataagcttttccagctccgagctgatgttctccatgtcatccccagccttgctcagaaagaattccatggtgcggccggtaatcttcctgccgtttttagacaggatgcctgccgcccatctggcaagctgggccggttcctgatggctcagttccgccgcatagccgtatttcttcactgccttatatagtctgctcctcttgtccacttccgattccacaaaaacaagacaggtggattcagggattcctcccatatactccgtcagctcgtccgctcctgccccgcctttaaagaatccgctgtcctccatcagtataaggcgcttctccgcaaaaaaaggcatggtgtccgcaaggccgataatttcgtttacattcatccctttgccttcaaaataattataattcatggtatccccgtcggtaagggcttctctcagacggctcttataacttttctttaagaaggcctcttcaccgaacagaaggtatacaggcttaaatgtacggtcttttatgtcctgattcaatgtctgcatgtaaaggtcgtccttccatatcccgtcaattggctgatgttttccaatttcagtataacacagggcaaggtgatttgtcactagagcatgtttgaaaagtgctgcttaagtgtctgaaaagcgctgcccaagtgtttgaaacgtcctgattaaggttcaaagtttccttgttcatctcccggatttatagtagactgtaatcatggaacatatatatggtgtaaggaatcatgttcatgcaaaaaacaggaggcaagaggaaaccatgggggaacaaaacttactactgaaaaggaagcttgtcattcagtccttcctgccgctgttcatttttatttttatcagatactttgattacaggatgatatcatccatatgccatttcatccgtgaattgatgcagaggaatttcagtgtcatgaaccggatatgggaccatccataccttggtccatttatcgctgcattcatttcactggcatgctccctttacggcataaccgccatgtggcagtttaagagcatgcagatgtccggatttgtggatgcaggcgaagaaatcgtgattgaagaagagataacggattccggaatcacatttttcatgacctttgtgctgcctcttttgctggacgatgtggaaaccttaaggggcttcatcatttttaccggtattttagggctggtcatccgtttgatgtggaccacccatttatattatcaaaaccccatattgactctgttgggctacaggatatataaattccgcttcctcaatcctgtcatggacggctgccgggataaaaccatgattgcagtgtgcagaacaggcattgcagagaaaaaaatagtgaaatggaaatatatatcggatgatgtctgcctgatgtacaataaaaactgaaacagcggagaaacatacaatggaaaacaaaagagaacacagcacgaaccatgctaccccaaaaacgccaaaggaaataattgtaaattcattaacagaactgtttgcggatgatgaatttgggtttgatatgtttatcatgatgaaaaccggggatccccccatgaagcatttcgctttttatgagggacccactggcagggaacatgattttaagctcaaagtccaaaactccatcgtcaagagtatcagagatctgtttcttgatgaggaggctgaatatgcaatggcggaacaggcagggggcaatcagaatattttttacatcataaaacagaatgacgattataagccgtttgaacttctgaataccccggaaaagcaaatgggtcctttcttcatggatgacagggacaaggccgatgcaatactcttccgcttcagaaggggcgttcacagcatctgggcttaccagtatatacttcccgccaccattcccaataagaaaaaccagcacttttttgcccggatattagatacggaacagactgattgttttgtggaaatgccggaacagctctttgtaatcacaagaaaagtagatctgctcgtcatggatgacaaaatcatcaccaaagatataggcctgatgcaaagacatttcgggttcaatgacttcatcaaggcatcagccaaaaaagcggtgtctgatatttcagatatccgtctggtgactaattgtgaaaaattaacggcatatatcgagcggaaccagactaaatattcccgcaagatgatgcggattaaacactaccatgtggtggaaaagacagcggaggaactgatacagataatcaatacagtcccccgctggcagggagtatttgatatccgtgacggacagatttatctgaggacctttagggatgtggaaaacctgattgatttattcgatgaaagatatacggtttcgctggtgacgggggatgaatttgatacggatgtaaaaaggctggctgctccgggaggaatgggaggggaggattaaaacacatgaaaatatgcatggaaacattccggcagcctttgagatatgtgttttggaaatagcctatgggagatacgaaaaaacactggaaaatcatgattgacagacgaactgaaaatggcttataataaaggtacaaaaaaggcagttcactccagtgagtggcttccaaaatattttatgtatctataaaaatagtcacatttgctttgggaggcgggtgactatttttttgtacctataatcataacgataagtactccaaacgctatcattaaagaaagtgcctcatatgtactcatgttataccacctcctttcggagatggaagtcacccagcagtaggaactgcctgtactaattatacaaaaaagcaatgtcactgcatagggcataattaaaaagaggcgcttgtataccttataaaattatagtaaaactctatatacaaaatataagtggagatttgacgaatgactaaccgaaatcatactacctaacatccttttcgtcagccacggcaatatgctccgggcattccaataggattgaatgtatatgaaaagaaaaatgcaagaaaaacactgagaaatcatgattgacagataaaccaaaattggtttataataaagatacaaaaaaggcagttcactccagtgagtggcttccaagttaatagcttaattaaaaatagtcactaagcttggtaggcgggtgactatttttttgtacctataatcataacaacaagtaccccaaacgcaatcattaacgaaagtgtctcatatgtactcatgttataccaccccctttcggagatggaagtcacccagcagtaggaactgcctgtattaattatactaaaaactttcgtcactgcatagggcataattgaaacgtgacgcttgcatgccctataaaattatagtaaactttatttacaaaatataaatggagatttgacgaatgactaaccaaaaccatactaccattaacatccttttcgtctgccatggcagtatcttgaaaagtcccggaatagccagtagaatcaatggttttacggcagatagaggcgtttactgcaccactactacaccatttttgaaagagctttgatgtgacagggaagcacgttaaaatataattattataggaaatcgaggtgacatgatggaaaatcatttgacgccataccaatcagttatttcagaaattaagagtattatttcctctggacaagaagctgcctatagcgcctctagcaaggcaatgctacttacctattggaatatcggaaaacgaattgtagagcaggaactgggtggcagtgaacgtgcagagtacggtagaggtttgatttctgcattggcagatgatttgacaaaggagtttggaaaaaattattccaaaagaaatttgcattattacattaaattttatcagtgctttcccgatgagcagattgtgaacgcgtgcgttcacaatcttaactggacgcatattaggagtcttctccgtgttacggatgaaaatgcacgttattggtatatgaaggaggcggttgacgagagctggagttcaagaaccttagatcgtaatatcagtacgcaatattatcatagacttcttcaaactccgaaaaaagatgctgtaattgaagaaatgaaacggaaaaccgcggaatttcaaaaaaatcaatttgaattaatcaaaagtccagtgattgcagaattccttggattcaaaaatgaggatacttacttagagggagagttggaatctgccattctttcacatattagagattttttgatggaattgggcagaggatttgcgtttgtggctcgtcagcaacatattgtaacggaagcttcggactactatttagatctcgttttttacaatatcgaactgaaatgttatgtcttaatcgatttgaaaatgggcagaattactcatcaggatgtaggacagattgatatgtatgtacgcatgtatgatgatttaaagcgagggcatggagataatcccaccattgggattttattgtgttcagaaactgatgaggatattgccagatattcggtacttcatgataatgaccgattgtttatgtcaaaatatctgacttatttgcctacaaaagagcagttgaaagcagagattgagcgtcagaaagaaattttttctatgcagcattcagatttttgagagaaatggaggtggcaagattgaaaatgagaagtagcggttatccaataccttaagggactgattaagctgaccgaaaaggtaacaattctgtggtggcttgtattttgaaagcgattgaaatagagccgacaatgtatcaaaaatggatttcaaattctatcggagaaaattatagtacaataaaatattatatggaatccatgaaaaatcatgaattataaggagaaggttccagccaaaaaggaaagagatttatcttatagaagatattttgattttaacaccacttactacaccatttgcccatgaatttgcgtatatttatatagaatagcgtaggtttggggaaaaacacgaaaaatgaaaaagcgccggacagcccgtaataccaaggtttgaaggcttatgaagggatataaacaagatgattaaaatactatttatttgccacggcaatatgttccggggcattccaataggtttaaatgtgtatgaaaggaaaatgtgggagaaagaatgaaaaatcacaattgacagaagatccgaaaatggcttataataaaggtacaaaaaaggcagttcactccagtgagtggcttccaaagaataacaactaaaaaatagtcaccacagctttgggaggcgggtgactatttttttgtacctataatcataacaacaagtactccaaacgcaatcatcaaagatagggtctcatatgtactcatgtcataccaccccctttcggagatggaagtcacccagcagtaggaaccgcctatacacattatacgaaaggatgaactgcctgtaaaggatacaaatggaaaccagctcttgtttattggacaaatttatagtagactttagctatcaaaaagtaacggagatttcgcgtatgaccaaacaagttcagaataacattaaaatccttttcgtctgtcacggcaatacactccgaggcgttccaataggtttgaatgtgtatagtagggaaaacgcaagggaaactagttggacaaattttttgaagattaagtgaaataataaaagtatagggaaattgaaagggtaaatgaaatatgaatatctctgttatgataaatgactttataaggcaaaatattcagtctgaggctgaagtgagaagcaaactgattgttcctttattagaactattggagtatcctaaggatttgagagcggaggagttcccagtatatggttatgaaggaagtaaagcattaaaaacaaaagcagcagattttttacaatttacatcaaatcaatttgataaatatagagggaaaactgatttagaagtagactgggtatataaacatagtttgcttgtttttgaggcaaaaaagcctacagaaaaagtattggtaaaaggacaaccagtattttattcagcatggacgaaatcggttgcttacatgatttcaaacggaattaacatagaaggttatatcgtgaatgcaaactattctgatacatgtgtattttcatgcagagttgaagagattcctgaaaaatgggaagagataaatcttttaaactatgatagaattctggaattaaagaaatcatcagatgaaaaggataaatggactaatagagatatttatgaaaaatacaaaaatgcgatgcgggtacattgtacagaagagttatgcatatgcgtagatagaagcttaaaggaatttgcatatgatttaaatattttaaagaatggagaaaataaagattttggcgacatattagataatacatcaaaaataatcacatcagaacctggaggtggaaaatcgtatctgatgtggatgctgatgcgtgagtatctgacaaagtgtaatggggatgaggataaaataccggtaattttagaaggaaggtattatggaaaagtatttaattccatagtagatggaatttatcaagaagttaatttgctgttgccttttttaacaaaagaactaattgaaaaacgtctgcgagaaggtggttttgtaattttatttgatgctatagacgaagtagaacaagattatgatgttttggtatatagtttgcatcaactaaggagaaatacagacaatacaataatcattacatcaagaatgcaaaattataaaggagatttttgttctgagtttgcacattattctctggaaccgttagatgatcataggattgttgatttgttgaagcaatactctcaaggggagatgcagattcaaattcatcaaataccaaaaagattaatggaaattttaagaataccattgtttttaaagatgtttgtttctatatcaaagaaggaggacaaatatagaattccgtctaatcatgcggcattatttcaagagtatattaatgagaaaatgaatgtactttcatgttctctgtatgataaaacgattattaaatcagtgctaggtaattatgcaatgtatagttttgaaaatggggacagtactgaacacttttttgaaattatggataatgcttgcaccgatctaaataaaacaaaaatatacgaaaaaatatggaaaacagggttgatgtctgagggcttacaaggaattaaatattatcataaagcaattcaagagttttttgctgcagtggaattatctacgtgggatagagataagcttaccgcctggctggatagcaatgcattgaaagaaaaatacaatgagatactttgttatttgactggtattatttcaaatcagcaaaaacaaaattatgtattggattacttggaaatacacaatttaaagttatttgtaaaggcacttaaatccagaagaaattttgatgttgttgagatggatttgaattttgaatacgctcagagttattatgcacaaattttaaaaacttatgacagtatagttcaatcctatttttataaaatatgccatgtttttgatgggtacagtataaaaggaaccggaaaaatctgtatccgtggctgtatgaattttacgaaaaaatctatttctatgataatttataatggaacatcggatgccaaaagtttggatattacagtatctgatgaaaacggtgtatatatggcagtagcagatggaaccgagataccaataaattcatcagtatttacggcgggacatttgcatgaacggtattacaatttagagttgttgtcttatgggtttgattcttccagggaaattgcaattgatataataaaaagtcaaatcacagaaatgttagagcaaaaaagcgtgtttgatattgagatagatgtattgctagcggagcgcatagaaaaagaattgaaaaaattgcgaaataggagagaaagtcaaaataacagacaggatttaagcttatattctaatgatataaattatgttattgataaagtaaatgaactggggatatataatcaagatgtagatatgattactactttttgcaaagtattaggacttagaatggataatgcggagagtctcctagatattaaggaggatttgactttggctccaggaagacattcatattggtttgacgaattatattcagatgagcagttagtaaaaaaagttgaaagaatactttccttatcgaatgaagcaatacaaacgataactacgaatattattccggtattatcaacagtaaaacccataaccagaaagataggaattgttcatcgaaaaggtaaattttctggcgttagttatatgagagtggaagtcagggagaatgaagatacgactccaataattgaatttggagaagataatattgatatataccctaaattagatccgtattatgttaataaattaaaagaaattggtaaaagtgaaagtaatgttcttgggtcaagttcagctgttttagatttatattttagggaggacgtatttcatgatcagatttatggagagataaaagatttgtttaaggagttattaggagacatatgaagatgataaaaatacttttcgtctgccacggcaacatctgccgcagccccatggccctctactatttccgcagcctgctaaaggaaagaggcctgtccggcataattcaggcagattccgctgctacctccaccgaggaaatcggtaatcctgtacaccacggaacccgcgccaaattaaagcaggccggcattccctgcgaggggcaccgggcaaaacagatgacgaaggcagattataaatcatttgattacctgattggcatggacagctggaatatccgcaacatgcagcgtattgcaggcggtgatccggaccacaaaatttttaagcttatggaattcaccggttccggaagggatgtggccgacccttggtacacgggtgacttcgacaccacctggtccgacgtcacggagggctgcgccgcgctgctggattatatatcagagcgtctttaaacattactctgccttcctttctgacagcttatatggttgccccgtttgtctctatgacacggcggtaccagtgaaagctgtctttttttatgcgcttaaggctgcctgtctcatgctcgttcctgtccacatacagaaatccgtaccgctttctaaagccttcatgggaactgagcaaatccataaaggaccagggcgaataccccattagctccacgccgtcatccagcgcctgtctgcatgcctggatgtgccttctcagatagtcaattctgtaactgtcatgcacctttccattttcagtaaggatatcggctgcccccagaccattttctgttatgagaaggggaagccggtatttctgataataacggttcaacacaatccgaaggcccattggatcaatctgcgccccatactctgtctatagtggttcagttgtcaagacaaaaatctaagctttttataatgaactgatatatgtaactgggtaggg

SEQ ID NO: 3135 - DNA, 182 bp, Unknown
  gut microbiota DNA sequence
ttcccgctaaggaggtgtatcctgtcttgcctgcaaaggcgccgggataatatacggcttcatttttatttaacatcttgtggtggttggccacataacctccctccggggtccgcttggtgggagccagctggtagcttcgggtgccgttgatggtgagaaattccgggttctggatggcg

SEQ ID NO: 3136 - DNA, 83453 bp, Unknown
  gut microbiota DNA sequence
atggtttcttaacaagacggcaaaagtacagtacaatagggacagttgaaaaatgggaggtaattagtaatgagaaaagcaagacaaataacaggccttttgatggctggtattatggcttccgccgtattggccggatgtaccaatgaaccggctccttcatccacatcccaggctgaagccgggaaggacagtgcagcaggcagcggcgcaccggccgcctcaggcgaccagattacgctccgctttatgtggtggggcggagatgagagaaatgaggcaactctggctgtcatcgaccagtatcagaagctgcatcctgaggtacggattgaggcggaaatgaattctgaccagggatatattgacaaggtatccaccatgctggccaacggcacggctccggacatccttcagcagaacgtggactctctgcctgactttgtgtccagaggagacttttttgtagatttctacgagtacaaggatacgtttgacacctccggctttgacgagacattcatcagccagttcggcacctttgacggaaagcttctggccctgcctaccggtatgtcatgtctggcaaccgtggccaatagaaatgcggctgaaacctgcggcgtggacctgacaaagcagatcacatgggattccatgctggaggacggaaagaagcttcacgcggagaatccggattattattacctgaatactgacaccaagatactctgcgagtatgtgctcaggccgtatctgcgtcagatgacaggagaatcctttattattgacagtgaaaagaagatgagctttaccagggaacagctggtagaagtgcttacatatatcaaggactgctatgacggaggcgtctttgaaccggcggaggacagcgccacctttaagggacagattcacaccaatccaaagtggatggatggaaaatttgtatttgcctacggcccttcctccagcatcaacctgctgatggacgctgttccggaagcagagtgtaccgttgtacagatgccgatggcagaagacagggtcaatgacggtttctttgcggataccccacagtatatgacagtaaataagaactctgaacatgtggaggaagcagtggatttcctgaactatttctacaacaatgcagaggcccaggagacgcttaaggacgtacgatccattcctcccacatccacggcaagacagctgtgtgcggataagggactcttaaaccagaccgtggtggatgcagtggatttggcagcagggcttaacggcaagagtgataagggatataccaccagcgcagaggtttatgcaattcaggaagacatgatagagagtattgcctatggacagagcactcctgaagaggcggccgacaatgccattgaactgattaatgactatctgagcggcctgaactaaaaggcttctcagcaaacaggctccaaaacaaacataaaagagattagcaggcggcccggacatcctttcccgggccgcttggaggataggaggaaataggatggaaaaggcaaagccaaggcacggcggctggaccaaacgcaacaggattggattcatgtatgtgtgtatctggatattcggttttctggtgttccagctgtacccctttatcagttcgctgctgtattcatttacaaactatgatatattccatgcgccggaatttgtgggccttgataattatgtgaggctgtttacaaaggacagggaattttggaattcaatggcagttacactgaagtataccttcatcacagtgccgggcaaggtggtgctggcccttattattgctgtgattctgaaccggaacctgaaaggaatcaactttatacgaaccgtatactacataccgtccctgctcagcggctctgttgcagtggcaatcctgtggaaggtactgtttatgaatgatggtttcatcaacagtcttctgggtctggtccacatcggcccggtcaaatggctgggaaccccggatatggcagtaatcaccatctgtatgttggaaatatggcagttcggttcctccatggtgctgtttttatccgcccttaagcaggtgccccagtccctgtatgaagcggccaggattgacggggcatcaaaacccaggatgtttttcaagataacactgcccatgattacatccattgcgtttttcaacatcattatgcagcttatcacagcccttcaaaactttacatccgcatttgtggtaacgaacggcggtcccaataaggctacctatgtgctgggtatgaagctgtatacggatgcatttaaatactttaagatgggatatgcctgcgctacctcatggattctgttcatggttatcctggtcatgaccattatcctgtttgtgacctcgaagaaatgggtttattacgataattaggaggacggcatgaaagagaaaaagattaaaaacggtattacctatgttattctcggaatcgtgggtgtggtgatgctgtttcctgtcatatggatgttctttgcctgctttaaaaccaataacgagatattcggcagcctgagccttcttccccagggatggagccctgaggcattcatcaagggatggaagaccacgggaacctacacatatgcccagtatttcataaacacctttgcgctggtggttcccaccacgctgcttaccctggtgtcctgctccatcgtggcttacggttttgccaggtttgatttccccggcaaccagtttctttttatggtgctaatagccacgctgatgcttcccaatgccatcatcatcatccccagatacgcgctgttcaacaagctgggctggctggactcctatatgaccttttacgcgccggctgccgtgggatgctaccccttctttgtgttcatgatggtgcagttcttaaggggacttccaagggatttggatgaatcagcctgcattgacggctgcggcccgttccagtgttttatacagattctgctgcccttacttaagccggctctgttttccgcgggcctgttccagtttttatggacctggaatgactttttcaacaccaacatttacattaacacggtttcaaaattcccgctgtcgctggccctcagggtgagtattgacgtgacatccaatatacagtggaaccaggttatgtccatggcgctggtgtccgtgattccgctgattctgctgttctttgcagcccagaaatattttgtggagggcattgcaacttccggcctgaagggatgattgggtgaaggtgtaataacatgtattgaggggagacgaggggaacatggaatttggcagcaccatactccacaatgtggaaagcctgattcgggatgaagaggcaggagattacctgctctgccgggtgccggaacccaccaggctggggcttaatatgaaagcgcagaaaaatatactttttgccagcaacagtgagatccggttcgtgatgaagggagacagtgccgtcttgggactcaggcgtatgccggctaaaggcgacatccgttcccagggggttctggaggtgtttcagggggattaccagggaagctacgaaataagcccctggtccgtaacggcagacagaactgaaattacaatccgcaggcaggactggtctgccatccaaaggtttgccggtaacggttattcctttcatccttcagtgaccagaattctgcttccttatgactggggatgttgtctcgggaacataaagggggatatccgtcctccaaagaaacaggagatgcccggaaagcgcctgctggtttacggttcttccattacccacggtgggaacgcgtcggtgccctccggtacatacgcgttcagactggcccggaaattgggatatgatttgattaatctggggtgtgcgggaagctgccaaatggatgaggccatggcctcatatatagggtccagggacgactgggacatggcgctttttgagctggggatcaatgtgatcgaaacatgggatggggaccggctctatggcaaagcccttgcattcctggccgctgtgctggaagccaggccggataaacaggtatttgtgacagacatgtattataaccgctatgattttgaaggggacaaaagggcggcacggtttcgcggcgccatacagcgctgcgcggcagttctttccgggcagtatgggggcaggcttcattatataaacgggcttgaggccatggatactccccaggggctgtcgtcggacggcctacatccatcggacctggggcatgggatgatagcagaaaggctggccggatatatggcagaaaaaaaggaggttaattgaaaatatgagaacgtacaaaaacccgattctgtatgcggattattccgacccggatgtggtgcgggtgggggaggattattatatggtatcctcctcttttacctatattccgggggttccgcttttacattccagagatctggttcactgggagctgattaaccactgcgtgaagaagctcccctttgagaaatacgcccttccatgccacggttccggcacatgggccccatccatccgctatcatgagggaacgttctttgtgtttatccctctggtggacgagggaatcctggtggccagatccaaggatccctacggggaatttgaatggaatatgctgtgtgaatcaaagggatggattgacccctgccctttctgggatgatgacggcagggcttacatggtttttgcctatgcaaagagccgctccggtataaaacaccggctgtcgctggtggaaatagatccccagtgccgctccctgctgacagagcccaggcttatatttgacggtgaacagattgcgcccacatcagaaggccccaagatgtacaaaaggaatgggtattactacattctgatgccctcaggaggcgtggagaccggatggcagtcctgcctcagatccaggtctgtctatgggccctacgactatagggtggtgatgcaccaggggaattcccgggtaaacggcccccaccagggaggatgggtaacttcgcccgatggaagggactggttcgtccatttccaggatgtggtggagctggggagaatcatccacctgcagcccatgtgttttctggatgactggccgttcattggccaggaccagaatggggacggtattggagagccggttagggagtggtccgttccggcaggagaacgtactacgggagaacgtgctacgggagaacatactacaggagaacgtactacgggaaaacatactgcgggagatcatacagagggagaacgtgcggcgcgagaagaccccgcaggagatgtgccggaatatgccatccgccagtctgatgattttgaggaaaagacactgggactacagtggcagtggcaggccaatcccgatgcgggattttattccctgagggaaaatccgggacacctgcggctgtattgctaccggaatccgggcagggaaaacctgctctggtatgcgcccaatgtgctgacccagattccgcagaaacagaagctgtccatgaccgtgaagctgtctctttccggaagggaggacggtgattttggaggaatcggcatggtgggccatgattacggatatgcaggcctgtaccgcatgggaaagggaatccagataagatgttaccggggaacggtcacacaacccatgtttgagggggaagccggtgagaagctggtcttttcacaggaagcagatagagaacaggcctggttcagactggtgctggaggaagataagacatatggtttttcctattcgtttgacggcaggaactttacccggatagaatattcatttcccctgaaacgtgccacatggaccggtgcaaaactctgcctgtggtcctgctcacgggaaaaccgggagtctgatgggtattgcgattatgagtatgtggaaataaaataaaaaccagggctgtccgcgttagacagccctggttcagttcgcccgccaagggagggcgctgacgggtgccggaatctgttctaatgaacttccgtatttttccgatataaaatcagcagtcctttcaggagcagcgcatcgtccaccactatcttatggcggcacaggggagtgatgaacttggccagcccgcccgtggcgatgatggtgggaggctctcccagctccttttccatgcggtccagaatcccgtcgatcatgtccacgttgccgtaaatgatgccggagcgcatacagtcaatggtattttttccaatgacatggctgggaacctccaggctgatgtagggcagctgggccgtcttgctgctgagtgagttaagggagaccttgaggccgggaaggatgacgccgccgatataatttccttttttgtccacggtacacagagtagtggccgtgcccatatctatgaccaccaggggaaggggatgttcatggctggctgccaccgcgtccacaatctggtcgcttccgaccgtcttggggttgtccataatgatattcatgccggttttcatgccggaccccaccagcaggggacggataccggtcaccttttccactgcgttcaggatggtggaattaacagggggaaccacggaagagagaatggctccttctatgcttgctatatcaatctgatgcatctccaggatgttcttaaagctcaccgcgtactctgtatccgtgcgtccctggtccgttgtgacccgctctatgaaatatgtttttgtctcgtctatgccgccgatgacggtgttggtattgcccatgtcgattgctaaaatcattgggggaactcctttcaatcatataggatgtatgttatactttaacatggattgtaacatagaaaaagaggaaagacaaccggaggaatcatatgttaaaaggaaagacagtccttcttggagtgacaggaagcattgcagcttataagacagccagcctggccagcatgctggttaaaaagggcgtgaaggtccatgtactgatgacaaagaacgccgctcacttcattaatcccataacttttgagagcctgacaggcaacaaatgcctggtggatacatttgacaggaattttgaattcagcgtggagcatgtggccctggcaaagcaggcggacgtggtgatgattgctcccgcgtcggcaaatgtcatcggaaagattgcccacggcattgcagatgacatgctgaccaccacggtcatggcgtgcaggtgtaaaaaaatactggccccggctatgaacaccaatatgtacgagaatccgattttacaggacaatcttgatatctgcaggcgttatggcatggaagttattacaccggcctggggatatctggcctgcggtgacaccggagccggaaagatgccggagccggaggtactctacgaatatatattgcgggaggctggttatccaggagacctggcaggcaggcggattcttgtgacagccggccccaccagggagtccattgacccggtgcgctacatcacaaaccactccaccggcaagatggggtatgccattgccagggtggcagcctacaggggagctgatgttaccctggtaagcggccctgtggacctgccacgtcccctgttcgtggagactgttccggtggagagcgccagggagatgttcgaggcggttaccgcaaggagcggggagcaggacatcattgtcaaggcagcggcggtggcggattaccggcctgccacggtgggaacagaaaaaatcaagaaatccgacggtgatttatccattgccctggagcggaccaacgacatcctgggatggctggggcagaaccggagggacggacagttcctctgcggattttccatggagacccagaatatgctggagaattccagggccaagctggcaaaaaagcatattgacatgattgtagccaacaacctgaaggtggaaggcgctggattcggtacggataccaatgtggtgacgcttatcacaagggacagcgagacagaacttcccatcatgaccaaggaagaggtagctgactgcctgctgactgagattttaaaaaggacaaaagaacaggacggaattcagggataaagccgcagacgggccggcagatatctataaaaaccatagtattcaaatagcagaataggcggtacagacagataatgaggattgaatcccgtatgacacgggggtcagtcctttttctgtttccagtttgtccccatacgatgccggaaaacatactgataatgtcttaacaaagttgttgtgaaatgtatctaaaaaaacgcggaattcacggcatatgacctgctcatattgtgagtttagactaaaatggcgaaacaaaaatttgaatattgactttggaaccagcagaatatataattaaattatatttgaaacgggtttcaagtataaaacatacaaagagcggaagagccggaaggcatataatccgcagacaggcaggatgatgggcttatgacgggcatacgcgatgtggcaaaactggcgggagtatccccctcaaccgtatccagggtaatgaacggtacggccagggtggatgatgagaagagacagaaggtggaacgggccatattagaaaccggtttcaaaccaaatgaggtggccaggtccctttacaagcgttcgtccaaaatcatcggcatactggtgccgaacatcatcaatccgttttttaatgagctggcaggagctgtggaggaggaatgtgaccgcaggggataccgcctgacgctctgcaactccaatgatgatttggaaaaggagaagcggaacctgagtctgttggaacggatgaatgcagacggagttatcctgatgaccaacatggatgagatacataaggaagtgggaaactgccggattccggtagtgatgattgaccggcagattgaggggggcaaggaaattgcctgtatccagtccaaccattaccagggcgggcggatgtccgtggagcatctgctggaatgcgggtgcaggcacatcgtacagatgagcggtccccttcatctttccagcgccagaaagcgccaccaggggtacctggatgtgtgcagggaacgtggaatcgagcctgcctggatagagggagattacagctttgagtcgggaaccgagatggcggcgcggctgctggagcagtacccggatacggacggaatcattgcggccaacgatatggtggccatatcggtttacaaggagcttcacaggaaaggtataagggtgccggaggatatgcagttaatcgggtttgacaacatttccctcagcagcctgtttacgccggagattaccaccattgcccagcccatcaaaaggatggggcaggaggcagttcgaatgctgaccgaatatgttgccggagcgcagattagccggaataaggtattcgatgtcaagctgataaaaagggacacaactctttagggaatggccgcagcgcagtaccaggccatttccgggcatcaaagggataaactgtaaccataaaataaaatgtaaagcagaaaaggaggaattatgaagacagcagtggtaggcagcatcaacatggacatgacagtgacagcagagaggattcccttaaagggggaaacactgaagggagaggacatccgctacatacccggaggaaagggcgccaaccaggccgttgccatggcaaagctgggagcagatgtggagatgttcggctgtgtgggcggtgatgaggcgggaagaagcctcataaagaacatggaagacatgggagtgggaaccacccacatcaaagtggctcccggagtgaacacaggattggcggtcatcactgtgggggatcatgacaacactatcgtggtggtggcaggagccaatgacaaggtggaccgggaatatgtggacagcataagggatgctctgctggcatgtgatatcgtattgctgcagcatgagataccccaggataccatcgagtatgtaattgatatctgccatgaaaatggggtcaaggtagtgctgaatccaggaccggccagaccggtgaagccggaagtcctggcaaaggtggattaccttacgccaaatgaacatgaggcagccatcctgttcggggatatgcccgtggaggagatgctgagggcacatcccggcaagctagtgattacccagggttccagaggcgtatccacatgccttccaacgggagaaatacttaccgtaccagccaggaaagccaatgtggtggataccacaggagcaggggatacactaaacggtgcatttaccgtagagattgcggggggcagcaccatggaggaagcgctccggtttgccaacacggcagccagcctgtccactgagcggttcggagcccagggcggaatgcctatgcgcagccaggtactggaagccatgaatcaggagaacatgtaaagcattgacaaatacgctttcggcgtaaagaagacggaggaacaaaaacatgaagagacacggcatactcaacagcaatatttccagggtactgtcatccatggggcatacggacagaattgcaatcgctgactgcggactgcctgtaccggaggggacagagcgcattgatttggctgtgacatttggaaatccccggtttatggacgtcttgaaagcggtttcaagtgatatgaaaatagaagcagtggttctggcagaggaaatcaaagaacagaatccacaaatcctggaagaaatccaggagctttttgccagctttgaaaccggtttcaaaccggaaaaggtggaatttgtcccgcatacacgctttaaggagatgacaaaggaatgcagggccgttatcaggacaggagagacaacgccctatgccaacatcatcctgcagtccggctgtatcttttaaagcagaatttatctggagggaaacaacatgaaaattgaaatgaaaggaatcaacaaatcctttgggcagaaccaggtcctaaaggacgccggctttgtgctggacgacggggaagtacacgccctgatgggagaaaacggcgcaggcaagtccacgctgatgaaaattctgaccggcgtctacacccgcgacaggggcaccgtcatagtggacggaaaagaagtgacctacaaaagtccccaggaagcggaacgggcaggtattgtctttatccagcaggagctgaacgtgctgtttgacctgacggtggaagaaaaccttttcctgggaaaggaaatcaaaaagggatttggaatatgcgaccggaaggccatgagggcaaaggccgaggaaaccttaaaacgtctgggagtcagcattcccacggacaaggtgatgtctgagctctccgtgggacagcagcagatgatagaaatttgtaaggccctgatggtggacgcaaaagtcatcatcatggatgaacccacggcagcccttacccagagcgagacagaggtgctgtttgaggtcatgcagtccctgcgaaaaaagggagtgtccatcgtctatatatcccaccgcatggaggaaatctttgagctttgcgaccgcatttccgttctcagggacggcacatacataggcacaaagaagattccggaaaccaatatgaatgaaatcgtcaaaatgatgattggccgtgaaatcggcgagcggtatcccaaacgtgactgcgccattggagacgaggtattccgggtggagggcctcacaaaggagggggtgttccgcgatgtggatttctcggtaaaggctggcgaggtgctgggggtatccgggctgatgggagcggggcgcacggaaatcatgcaggctattttcggaaacctgccctacgacagaggcagcatttttatcaacggaaagcaggaggtgattaagaatcccctgcaggccattgaacatggaatcggcttcataacagaggaccgcaagacagagggacttctgctggaggagagcattgagaaaaatgtatccctgaccaatctggggcgtatctctggcaagagcaaggtggtaatcagcagggagaaggaaaaagggctggtcacaaaggccatagaggagcttcatatcaggtgcttcgggccaggacatgagtgtgtgaacttaagcggcggcaaccagcagaaggtggtattcgcaaaatggatttacacagaacccagaatactgattctggatgagcccacaagaggcgtggacataggcgccaagaaggaaatatacagcattataaaccagctggcaaaaaagggggttgctatcatcatggtgtcctctgaactgccggaggtattgggaatgagcgaccggattatggtggtgcgggaaggtttggtcaggggaatcatcggccaggctgaggctgaccaggagaagataatgacattggctacgggaggtaccttatcatgaatgaaaataagaataaagtcatcaattacgcccaggattttggagcgctcatcgcccttatcctgctggtggcaggcatcagcattgccagcccaagtttccgcaccggggccaatttcctgtccctgctgcgccagtcttccattaacggactcattgccttcggcatgacctttgtcatactgacggacgccattgacttgtccgtgggctcggtgctggccctcagcacggctctgtgcgccggaatgatttcggcaggggttccggctgggctggccatgattctggcactggtcctgggctgcgccatgggcgttatcagcggcgtcatggtcaccaagggacgtctgcagccatttatcgcaaccctcattaccatgacggtataccgcggcctgaccatgatatacaccaacggaaagccaatctccaacctgggagacagcttcatcctgaaggtggttggaaaggggaagttctacggcgttccgattccggtcatccttttgatactcctgttcctgctcttttatttcctgttaaataagaccaccttcggacgcaggatttacgccaccggaagcaactggaaatccgccaagctggctggcgtaaacatacacaggacaaagatcatcgcctatgccatatccggcaccatggcggcattatccggactgattctgctatccagactgggctccgcacagcctacccttggaaacggctatgagctggacgccattgccgcagtggccctgggaggcaccagcatgagcggcggcaggggaaaaatctacggaaccctgattggcgtactgattatcgcggtgctgaacaacggccttaacatccttggcgtatcttcctactatcaggacgtaatcaagggtctggtcatcctgattgccgtactctcagaccgcaagagataggaaaacagtacacagcacacagaaatctgatatgaaattaagaatatgaattttgggagggaaagaccgtgaagattaagaaaatactggcacttatggcagcaggcacaatgcttatgacaatgggaggctgcaacgccatcaccattgacggggaagaaaatgtcagggagggaagcagcggaaacgtgattggtttctctgtctccaccctgaacaacccgtttttcgtgaccctgacagaaggagccagaaaagccgcgacagagaataacgtggagctggtggttgtggacgccggagacgacgctgccaaacagaccagcgacatcgaggatttggtgtccagaaatgtgggcgtgctgattgtcaacccggtggattcagatgcggttgcaccggcggtaaagagcgccatgtcccaggggatcaaggtgattgcagtggaccgcggggtcaacggggtagatgtggactgccagattgcctcagataatgtggcaggagccaggatggcaacagagtatctcatggatcttgtgggagaaggcgccaaggtagctgaattacagggagtgcctggggcttcggccaccattgacaggggagcgggcttccaccaggtggcagaccaatccctccaggtggctgccagccagaccgctaatttcaaccgtgccgagggtatgacggttatggagaacatacttcagtccgacggaaccatcaaaggtgtgtttgcccacaatgacgagatggcccttggggcagtggaagcagttgctgcctccggaaaggacataaagattgtgggatttgacgccacggacgacgcccagaaggcggtgaaggacggcaaaatggcggccacggtagcccagaagccagataagatgggcgagacagccatcgggacagctgtcaaaatcatggcaggggagacagtggagaaatccatacccgtggaagtggagctgattaaatagtttcaacagattgacacatgagaaatggacccttcagaaccggaatttccgggctggaacgggtccattttcgcctgtatattactatttttttaatgcctgttttttatccctgtcatgctccggggcttaccatgtcttttcaagttccgtcttaaagtctactgagtaaggattgtcctccctggtctttaaatcctcatagagcgccctgcgctcgtcggcgctttcctcggcccagtactcatagccccgcatatagcttgacatcaaatcatcccaggattcaaataagggctgcatggtccgggcgatttccagggatttatccagtgcctcctgttctgtgtagtagccggccagatagtaaaagctcatcaggttcatggcgcggcagtagtcccagcctgcaatggcgtcagggccgtactgctcatagaagccgaacatatccgcataattttgggcctcatccgcagtcatctgaaactggtccagcaggaaagcgcttctctcattcggggctatgtcccggatgcctgcttcttccaggtatgccatgtcctcagcaaaggtatcgcggtggccctcggtcagaatccagtccagggtgctgtctgctgtggcgcggtctgtaacgctccaccattcttccagggatttctgctccatggccatgacatcatcattggctgccaggccggcaaaacggttgtagtcccagccgtttaagtccgtgaggaccgcgtaggaagcattgaaccagcgaatggtatccgtcagctttgcggtggttctgtcttccacctcaggagcactttcgcggaatttagaacaggagaccttgaaggatgcaatcttgctgtcattcatcttgtccgccgcataggccatggagtagtaggcatagtctgtctccccatatacaatataggcatccaccttggtgctgtccacggacatccttccggttatggcggttacattggtcatgcccggtacctccggtgcctcggctttggtctcgccggacagattgtagctggtcttaataatatccttcacatcctccatgctgccggcctggctggaggggccgtttttgatgaactggagcaggaacacggcgttgtcttctctgctgctggcggcaatcagccatccgtccatgggtgcctcctgggttttccaggacttgtccagataaatggacgcagtgtcatccggtgtggagaattcctgcatctgggccagcatatcctccggggttttggccccgcagccctgcagggctgcggatgccagggcagccgtgaggcagaataacagggccagtttctttggttttgtgcatttcatgcttttttcctctctttgtgggccttacgggtccgtttatagtaacagaaggggggtggatcttatgagtacagtatactatagaatcatccctgccggcaacggcaatttacagagatttccatagaagggaggctgacgggcagaactaaaaacagaaccaaaaacagagggaaaatcaaaagccaaaggccttgacttatgtttccaatcataatagaataaaaattggatgattttgggcgtacttccaaagtacgtccatcttttactcaatggaaaacggaggacgaataacttgtcacagatagataaccagatgacagaagagataaaaaagcggaggacatttgcaatcatatcccaccccgatgccggaaagaccacgctgacagagaaattcctgctgtacggcggcgccattaatctggcaggaaccgtcaaggggcgcaaggctgccaaacatgctgtgtccgactggatggagattgagaaggagagaggtatctcagtgacctcctctgccatgcagtttaattatgacgggttctgcatcaatatcctggatacaccgggacaccaggatttctcagaggatacttaccgtaccctgatggcggcagactccgcggtcatggtcatcgacggttcaaagggcgtggaggcgcagaccatcaagctgtttaaggtatgtgtcatgcgtcatatccccatctttacgtttatcaataagtttgaccgggaggccagggacccttatgagcttctggacgagattgaagaagtgctgggaatccgcacatgccctgtgaactggcccattggatgcggcaagagctttaagggcgtatacgaccggttctcaaagaagataaccaccttcacggctgccatgggcggtgccagggaagtggacagccaggaatttgccgtggacagcgcggatgtggattccatcatcgggcaggactatcaccagcagctgagggacgacatcgagctccttgacggggccagcgacgagttagatatggagcgggtcaggataggggatttgtcccctgtgttcttcggatcggccctgaccaattttggagtggagacctttctggagcatttccttaaaatgactacgccgcctctttccaggaagaccctggacggggtgatagacccgttccgccctgacttttccgcctttgtatttaaaatccaggccaacatgaacaaagcccacagggacagaattgcttttatgcgcatctgctccggcaagttcgaggcagggatggaggtaaaccatgtgcagggaggaaagaagatccgtctgacccagccccagcagctcatggcccaggaccggaaaatcgtggaggaggcatatgccggcgatattatcggcgtattcgacccgggaattttcgccataggcgataccctgtgcgcttccaatgagaagtttcagtttgagggcatacccacctttgcgccggagcattttgccagggtgcgccaggtggataccatgaagcgcaaacagtttataaagggtgtgaaccagattgcccaggaaggtgcaatccagatattccaggagtttaattccggtatggaggaaatcatagtgggagtggtgggcgtgctgcagtttgaagtgctgacctaccgtctgcgaaacgaatataatgtggaggtcatcctggagaagctgccctttgagcacatacgctgggtggagaatccgggcgaggtggatgtggccaggattcagggtacatctgatatgaaacgaattaaggacttaaaggataatccgctgctgctgtttatcaacagctggagcgtgggcatggtattggaccgcaatccggcgctgaagctctcagaattcggaagagcctgatcccatgcaggaaacaggaccatgggaccggaatgcggtccctgagtgctcataacgagccgctgcactaagctcgaagggacctcgctaagtgccagcggaatgtatcgcacgtaagggaccagactacggtccctgagtgctcataacgagccgctgcactaagctcgagaggacctcgctaagtgccagcggaatgtatcgcacgtaagggaccaaactacggtccctaagtgctcataacgaggaggtaaaattcatgagtaagattgatgctgtaagggctgccatggtggaagccatgaaggctaaggacaaggccaggaaggattctctttccatgctgctgtccgccctcaaaaatgcggaaatcaacaagagggagcctttgacggaagaagaggagaacgcggtcgttaagaaggaaatcaagcagacccaggaaacgtacgagatggcgccggcggaccgtgaggacatccgttcagaggcagccgccaggatggctgtttacaaggagtttgcgccggaagacatgagtgcggagcagattcgggaagttataagtgcggtcctgtctgagctgggaatcgaaaaccctacggctaaggataagggagccattatgaaggtcctgatgcccagggtcaagggaaaggcagacggtaggctggtcaatgagacgctggcttccatgttccgttaaggacgccccggggcttttgcaggtcccggtccccccggcttggtgcgctgagcagcaggccggacagagcagaaggccggacagagcagcataataaaaggatgcggggcttaagcttcgcaggaaaaggagacggttacgatgtataggaatgaaattgaaggttttattgattcccacagggaagaaatgatagaggatatctgtacactgtgcaggattaacagtgagaagatgccttatgtggagggcaagccttacggggaaggcccgttccaggcccttcaggcagctcttggtatggcagagggttatggtttttccatccgtaattatgacaattatgtgggaacagccgacctcaatgacaaggagagacagctggacatcctggcccatctggacgtggttcctgccggtgagggatggacggagacaaagccctttgagccggtggtaaaggacggaaagctctttggacgcggtaccgcggatgacaagggaccggccgtggctgcgctttatgcaatgagggcagtgaaggagctggggatcccgttaaataagaacgtcaggctgattctgggtacggacgaagagtgcggaagctctgatattgtaaattattacgacaaggaggatgaggcgcccatgaccttttctccggatgcggaattcccggtcatcaacattgaaaaggggcgtctggaaggtcatttccatgcatccttccaggcttctgaggcaatgccaagactggtgaaggtggaagccggaataaaggcgaatgtggtaccgggcaaggccagggctgttgtggaaggcattgaccttaagacattggaggccgcggcagaggctgtggagaaggagacaggaatttcttttgtactggagggtgatttaccggttatgacagttactgcccagggggagggcgcccatgcatccacaccccaggagggaaaaaatgcccttacaggcctgctggtgtacctgacacgcctgccttttgcagagtgcccccagatggatatggtgaagaacctgctgaagcttttcccgcacggcgatacctgcggaaaggcagccggaatcagcatggaagacgagctgtccggtgctctgacccttgctttcagtatgctgactgtaggcgctgatggactggaaggcgtatttgacagccggtgtccaatctgtgccacagaagaatctgtgctgggagtggtaaagcaggccatggcggaccaggggcttacactggaaaatgattccatgataccgcctcaccatgtggacggaaattctcatttcgtaaggacgctgctgtccgtatacgaggactacacaggccttgagggcagctgccaggctacaggagggggcacctatgtccattctctgaagaatggtgttgcctatggcgcggccctgccgggaacagataaccgtatgcatggagccgatgagtttgctgtggtggatgagcttgtcttaagcgcaaaaatatttgcacaggtcattgtggagctgtgcagctgatagcggaaatataccctgtttttctgtgacctgattgtgaatgaggggatgatggaatggtgagactgggatgtgtaccggaacagggcggaccatccgcttatatggaaaatgccaaggcggcccggacggcgccgccggggcgccaggagcaaacagatgatttgggtaaaaatggtcccgaaacaacggccgtcaaaagcaatgacagtgcctgccgggatcaggctgtgtggagctggacagagggcgcggacgattggagagagcaggctgtccgaatgctggaacagctgaaaaagcagtatccgggcattgtgttccatttggcgcaggagaaggacgccggtgatttggctgccctggctgtccgggcagggaccggcgtacatctgtatctgtcccgggaatttgtggggcgcatgggcagcagccgggaggactttagccagtgctggtctgagctggtatctgcggccggaactctgctggcaaaacagggacagaccagggccgtgggagcatttttaggggaggaagggacttcctactggtctgtgcaggataaaacggaaaaggaggctgtgcctgtggtctcacacacaggcgcaaaagagacaccttctgcaggcagcgaccccagggtgcgagtttctgtttcacttaatgtctccagccatttttcccgggtggccagggcccgcaccaagggtcaggtgcaggaggctgtgtgggacatatacaggtccatttccaatctgaagagggcggcagcctgtggtgatgaccaacagcgtgtaaaggcatccagagccctgcgttccctccagaagctgctgggccgcagcggcaggaagatgcggaagctggagcgggagcggcttaaggcgcaggaacagaaaaaggcggaaaaggaacaccaagacaagcgggccttccggcttaagcaggagaaaaggcgcatgcgctcggccagactgggatcagatgccggtcttgtgaaggaaggccatggagatgacttttatattcaggcgtacaggcggttttcaggaaccgcttataaatgggagcaccagatgccagcgggcaccatggcaggcctttttgacgccgttccatcaggaggcagtggaatggccggcacggcggaggccggatttacggcagctgatgtgattgtctcaggagacaccctttaaatcataacgaacattttagaagggtgtttcaggaaaaagtgcttgacaaataggttcatgtgatgtattttcttaactaagataaatcccagcgatttaataggaatcaatacaggaggaacgtatgaatcagtttagagccatgcagatgaatatggatatgatgaacagcatgtacatgatgatgtgctgtgtatccgcatgggcaaaaaactgaatgtaagtttcatctgtatggattgtgattaatcaggagatatcccggtagcagggaaagattcagggccgcaagtccgtgcaggacatgcggcctttttgctgtgattttgcctgaacgctgtaggctgccacgatgtggccagggcgcgggcatgtgcgggaccccgaatatgtgtttcaggaacaaaagaaaggaattaaacctatggaagcaaataacgaaaatcccatcattcagctggtggggctggggaaacagttccagaccatgaatggtccggttactgccctggaggatatcaatttggaaatccggtatggagaggtgttcggtatcatcggcctgtccggtgcgggtaagagtaccctggtgcggtgcatcaattatctggaagtgcccacttcgggaaaggtcgtatttgaaggaaaaaacctgtctgtgatgaaggacagggaaaagcgtctggccaggcagtccatgggcatgattttccagcagtttaacctgctgtcccagagaaatgtgcttcagaatgtatgctttccactggaaattgcaggggtatccaaggccgaggccaaaaagcgggcagaggagcttttaacactggtgggtctggaggtccggatgaaggcatatccggcgcagctttcaggcggacagaaacagagggtagccattgccagggccatggcaacgaacccaaaggtccttctgtgtgacgaggccaccagcgcgctggaccccaacacgaccaaatctattttggaactgcttaagaagataaaccgggagatgggaattactgtcattgtcattacccatgagatggcggttattgaggccatatgcgacagagtggctatcatagaccacagccatattgcagaagtgggaaatgtgtccgatatcttttccggccccaaatccgatatcggccgtcagctgattctgggggatgtggctgagcagaacttaagctttggcaattcccgccagatccgcattatttttgacggaagagagtcttctgagcccgtaatcgccaacatggtgctggcctgtaaggttccggtgaatatcatgcatgcggacaccagggatattgaaggcaaggccatgggacagatgatcatacagcttccggaggacgatacggatgccggcaggatttgtaactatctgaaaacagccaatgtaaagttcgaggaggtgcggtgatatgcaatttgatgctacgaccataaatatgcttgtaaaaggaatctgggagacgatatacatggtattcctttcctctgccttatcctatgtaattggtattcccctgggaatcgccctggtggtgacggacagggagggcatcagcccggtgcctctgtttaacaaggtcctgggtctcatcatcaatctgctgcgttccgtgccgtttatcatcctgttaatcatggttcttcccattaccaagttcattgtgggaaagaccataggatccaatgccacggtggtgcctctgattattgccgcagccccttacatagggcgtatggtggagtcttccctgaaggaagtggacgcaggtgtcattgaagcagccaaatccatgggtgcatccacctggcagattatagtcaaggtactgctgccggaggccaagccgtctctgttggtgggagcggccatatccgtgaccacaattctcgggtactctgccatggcaggatttacaggaggaggcggactgggagatatcgccatccgttacggataccaccgttaccagaccgatatgatgatggtgaccgtagtgcttctggtcattattgtgcagctgatccaggaggtcgccatgcgcatgtccagaaagagtgataagagaatccggtagaaagattccggaacacaatccgggaagagagtgcgggaacagaatccagggaatccagtaacagaatccaggaagagagtcccgtgatacaaagttgtatgtgaatctgccgaggctgtccggtttcctgacaaggaacggataacgtatatgacctgcatatgaggaaggacgtgcagcctgggctgatgataaatgccgtatcatggcgcaaaataacaggggcagagccccaacgcgaggaggacacaattatgaagaaaaacatcttaggcacagccgtactggctgcagtattggtatcaggagcgctcagcgcatgctccggcagcccaaaggagactgcggcggcagatacaacggcagcaactgccgggactcaggctgctgattccaaggaagaggagaccacggcggcagaggcggagaccacccaggccagtgcagaactgaaggaaatcgtggtaggagcaagcccggcgccgcatgcggaaatcctcaatgcagcgaaagaggttctggcatccaagggctatgagctgaagattgtggaatatacggattatgtgcagcccaacaatgcactggattcaggagatctggatgcaaactattttcagcacaagccatatctggattcctttaatgcgcagaacggaacaaagctggtcagcgcaggcgccatccactatgagccattcggcatttatgcaggcaagacagcatccctggaagagcttcctgacaaggcaaccgtactggtgccaaacgatgtgagcaatgaggcaagagctcttcttctgctggaagcgcaggggctgattaagctgaaagacggcgttggcctggaggctactaagaatgatatcgtggagaataccaagaacctggatatcgtagagttagaggcagctcagcttccgcgttccatttctgacggcgatattgcggttatcaacggcaactatgcaattgaagcagggcttaaagtcagcgatgccctggctactgaggattcccagtcactggcagcaaccacctacggcaacgtggtggcagtgagagagggagaggagtccagcgatgcaaccaaggccctggtggaagcattgaccagccctgaggtaaagcagttcatggaggaaacttatgaaggcgcagtggtgccgctgttctaaagcatattttaaggcgttttcaagcatactcctaaggagagaatgcagttattcataaaattgtaagaggctgtccgccggggatataccctggcggattgttttattttacaaaatatgttatacttttccaaacgtgtgccctgtatctgggcacatgaacgcggccgtatgggcttgagagaggagataatccatggaaaatgaaaacggaaacagatacggtaccggggaaggccaggggacggattatcatacaggtaacagggaaccagtgattgtggcggaacagccggccagagaggtgacagaggaggactccggacagacatctgccggacaggacggttccgatggatggagcagtcctgtggacgcacccttacaggaggacaggtggagcgaaaccggggataaaccctatctgggaagtccctgggaaccaaccccatccggggcatcgtatgacgcaggaaaggaaaatggcgtcagcggaaatgacagccagccggtatataagccagctccggcttcttatggtcagggccagccgggggcaaatcagggtcagcccggaataaatcagggtcagccggggaccggccagggcggcgatttcagccaaaatgacagccgccgggaaagaggaggcagtcagccgggcggaaacggccaatgtcagccccaataccagacccagtatcagacccaataccagtcttaccagcctgcgtatcaggaaaagaacaatatggctacggcttctctggttatgggaattctttccctgtgcagtatctgctgctgcatgctgttcggtgtcgtgttcggcgtgctgggcatcatatttgccattatgtcaaaaagaggagacagaatggacagccaggcaaaggccggactgatactctctattatcggtgttgctgtcactgtgcttattatcatcttttttgttgtgattgaggtgttggctgtcataccggaactgaactgaaacagcggctatcagtaacatctgccgggtaccgccctgcagaatggctgctatccgcgtaaccgcggacagccggtattttcaaaaatcaggttttaatcggacagtatccggcatatagtaagtagcaagagaggccgggaggctgtggacgtgaggatttacgacctgaaacaaaaagaagtgattaatgtaaagacctgcaagcgccttggatttgtgggagatgtggatttcgacatggaaacgggctgtctgctggccctgattgtgcctgggccgggctgtatatgcggttttttgggccgggagaaggaatatgtgataccattctgcgatatctgccaggtgggaaatgatatcatattggtggacattaaagaaaaagatgtgacggaaagcattaaatgctgaatggaaacatacagcggccgaaaggaaacatgcagcgcggattccagggggattcgcgcttttttcagcccctcagggcagaggagtggccgccagggcttcccctgccggccggtttgtgagaaaaagttgtatgaaaagcatttgctttttacaaatctaactatacaaacgaattgtgaaggttttatggtggaaatgtgaaaaatctgtgaaggggtaccataaaatagtcacaggttttggtggatggctgtcaggaactccttcagcttccccacttcaatctggcccggtgcagaggcttcctttacagagccaaaggtcaggcaggagccgaacacctcccctgacagacggcttatgagcccggtgcctttcatggacatggtgatgagcggacaggacagggactggctggccttgtgggtggcggacaggagggtcagcacatcgccggctgactggggcatcaccgcaatcttggctatgtctgcccccaggtcctccatatgatgcaggcggcggagaatctcctcctctttgggggtggctgcgaaatcatggttggacagtatgacgcttacctggtgtctgtgggccaggtctattgtctcacgtatcatatcgtcccccgagaaaagctccaaatccaccagatgtacatggccggagcagatggcgtgttctgccagggagcggtacgccggcaggggagcggacagatgaccgccctcccgttgggtacggaaggtaaagagcaggggaatgtctttcagggcagactccaggccgggaaggacctggtccagggtgtctggctccagtatggaatcaaaccagtccgctctccattcagctatatccactggctgctccgtgaaggaggcagcctggtgaatcagggattcataatccttttccaccagcggggcgcatattttcggcattccccgcccaagtattgtttgttttatgatgacatttttcatgataaggagcacctttcctgtaatctttttggatttgtctggattcattataaagcggggaggggatttcgtccatactgtaatgaaaaaagaacaaagtccttgctatccatactttcttcggttaaaatatatgaagcgtttaaggcgatacgtgaaaaaagaaaggatgggtaacccagatgaaatgcccctattgtaatgaagcagacaccaaggtcatagattcccgcccggcagatgacaacagctccatacgcaggcgccgccagtgcgagcgctgcggtaagcgctttaccacctacgagaagctggaaaccatgccgttaatggtaataaagaaggataattcccgggagacatatgaccgttccaagattgaagcaggaatcattcactcctgccataaacggccggtatcaccccagcagattaattccatgattgatgagattgaaaaccagatttttaacatggaggaaaaggaagtgcccacctccgccatcggagagctggtgatgggaaagcttaaggacctggacgaggtggcgtatgtgcgtttcgcttctgtttaccgggaatttaaggatatgaatacgtttatagacgagattggaaaattactgaaaaaatagaattgctaaaatagattggaaggaatacttataaacatgctggaaatgttttatccccgccgttacgaggtttcaacttatgtgataccttttgactattatcatgcacagggaatgcagggcgtgatttttgacattgataataccctggtgccccatgacgcgccggcagacggacaggcagtggaactctttgagcggcttcgcgccatgggaatgaagacatgccttttatccaacaataaggaacccagggtaaagccctttgcggattttgtgggttcctgctatatccataaggcaggcaagccgggagtcaaaggatatgagaaggccatggagcttatggggactgacagggaacatactctctttgtgggggaccagctgtttacagatgtgtacggtgccaacagggccggcctctacagtatcctggtaaggcccatgaatcccagggaggaaatacagattgtgatgaagcgttacctggaaaagccggtgctgtatttttataaaaaacacgccagagatataaaccaatacagggagtaaagtgagacaatggacggaaagacaagagtatgcgggctgattgcaaatccggtggaacattccatgtcacccatgatgcataatttctttgcgcagagaacaggggtgaatttagcctacgttccttttaaggtggaggaggaccgggtgggggacgcagtaaaaggggcttatgccctgaatatactggggatgaacgtaacggttccccataaacagcgggtaatggaatttctgtctgaactggatgaggatgccagggccatcggggcggtcaatacactggtcaggacagaagcggggtataagggctataatacggacggcgcaggccttaagcgggcttttgcggaagccggtatccggacagaaggagaacactgtttactcattggggccggaggcgcggccaaggcagcagcctatgtgctggcaaagggcggggctgcaaaaatccacatcctcaaccggaatgaagccagggccagggagctggccggctatatcaacatactgaccggcagaggtctggcggaggccctgcccctggagggatacaggaatcttcctgccagaaagggcggttatctggctgtacagtccaccagcgtgggcatgcatccccatgtggaggatgttattattgataatccccggttttatgagatgattcatacgggtgtggacattgtctatactcccgccaggaccaggtttatgaaaatggtgcaggaagcagggggaagggcggtgaacggcctggacatgcttttatatcagggtgtgattgcctatgaactttggaatccacaggtcagggtggacagtgggaccatagagctggcaaagcagatgattgaaaattacctgcaaaagaaacaggcaggggagggcaggggagataacctgattctcattggcttcatgggtgctggaaagtcccgtgtgggagagcatttcgcagcacgctaccagatgcccataattgatacggacaaggagattgaagcggccgccggtatggccatatccgacatatttgccacccagggagaggaagccttccggcgcctggagacaggcgtactggagaagctgctggagcagggaggcagatcagtgatttccgtgggcggcggactgcctctcagggaggaaaacagggcgcttctcaaacagctgggaaccgtggtatatctggatgtcctgccggaaaccgtcatggaacgaatcggatccgatgtgtcggaccgccccatgcttcacggcggtgatgtgatgggacgtatcgtcagccttctggagtcgagaaaaccccattacctggaagcttctcatatcattgtggatgtgaacggacgggacgtggatgatatcgtggaagagatttaccgcagggcagcggataaaacttgctaaaaagggagaaatttatactgccgttaaaaaagaacttgaaaatgctccctacatagtatagaatataaaagattaatgacttatggggcgcttaggcaagcgtcatgaacgaactcaaggaggaatatctttatgatatcagcaggtgattttaggaatggcattacactggagattgacggacaggttgtccagattatggaattccagcatgttaagccaggcaagggcgcagctttcgtgcgtacaaaattaaaaaatgtaatcaacggcggcgtggtagagcgcactttccgtcctacagagaagttccctcaggccaggattgacagagtggacatgcagtatctgtatgctgacggcgaattatataactttatgaaccaggagacctatgatcaggtagccctgaaccaggacatcatcggcgatgccctgaagtttgtgaaggagaacgaagtatgtaaggtctgctcttacaatggcaatgtattctccgtagagcctccgctgtttgttgagctggagattacagagacagagccaggtttcaagggtgataccgcaaccggtgccaacaagccggcaaccgtagagacaggtgcaaccgtatacgtaccgttatttgttgaaatcggcgataagattaagattgacaccagaaccggcgaatatctgtcacgtgtataatacaactgtcagatacgccctgggaggcggtttgtaagaattgctccggtatttgccggggcagtttttaactttccgggaaaaggaaagacctattgtcacagtaaaggagagtatacattgtgaataagattctggatatgatggagcgggaattaaagcaggcatttacagccagcggatatgaggattcattcgcaaaggtggttttgtcaaaccgtcccgacctgtgtgagtaccagtgcaacggtgccatggcagcggctaaggtatataagaagaagcccattgatatagcgaaccaggtggtggaacatctggtctcaggcggctcccaccctgttttttccgaggcggaggctgtaatgccgggattcatcaacctgaagctgtcagaggcgttcttggcagagtatacgggttttatggctcagtcagataagctggggctggaagcacctgagaagccggagactgttattgtggattacggcggggccaatgtggcaaagcctctccatgtgggccatctgcgggcagctattatcggggagagcataaagcgtatgggccgtttcctgggccaccatatgattggtgatgtgcacctgggggactggggactgcagatgggccttatcattgaggaactcagggacaggaagccggagctggtgtattttgacgaatcctttgagggaccatttccacaggaggcgccctttaccatcagcgaactggaggagatatatcctgcggccagcgccaagtccaaggcagatgaggtgtttaaggagagggctcatcaggcgaccctgaagctccagagaggatatgccccataccgggcaatctggcagcatatcatggctgtctctgtggctgatcttaagaagaattatgcaaatctgaacgtggaattcgatttgtggaagggcgaaagcgacgcggaaccctacatcggggacatgattcagatgctggtggataaggggctggcccatgagagccagggcgctctggtggtggatgtggctcaggatacggacaccaaagagattccgccctgcctggtccgtaagtcagacggagcttctctttatgccacatccgatttggcaaccattgtggaacgggaacaggattttaagccggaccgctatatttacgtggtggataaacgccagggaatgcactttgagcaggtattcagggtggctaagaaggcaggtattgtgaaggaagatacccccatgattttcctgggcttcggcaccatgaacggaaaggacggaaagccatttaagacacgtgagggcggagtcatgcgtctggaaaagctgattgaggagatcaatgaggcggtataccagagaattatggagaacaggaccgtatcagaggatgaggccaggagtacggcagctgtggtaggtctggctgccctgaagtacggtgatctgtccaaccaggctgccaaggattatgtctttgatattgaacgttttacctcctttgagggtaatacaggtccatatatcctctataccattgtgagaatcaagtccattatcgccaaatacagggagaatggaggccaggtaagccaggatgccgttgaaaagaagattcttgcctgcgccggaagttcggagaaggccctgatgcttatgctggccagatataatgaggttctggaaaacagctttgcggagacagcgcctcataagatatgccagtatatttatgagctggccaatgcttttaacagcttttatcacgacaccaagattctggcagaggaggatgaggccaggaaagagagctatatcgggctgatttcccttaccagacgggtgctggaggcctgcatcggactgttgggaatcgaggctccggagcgcatgtaaccgcggggatgtcctgggatgctgataggtcctgccttggggcaggggtatcaggaatcccgctgaaaggatgcatgaagcagatgaagattgtcaggatgaacaccagcagcttctggaagggggaggctggtgtgaaaggcctggttgaagaccagggggaaacatttgaggtaaacatatatctgggaagcggaagagtaagggattactcctgttcctgcagcaaagggaattcttacaggggaatgtgcgcccatggggaggccctttttgcgtattataatcagcagagggaggaagcgtccaaaccaacggttcatacatcctcccaggttcacaccatgattcgggaatacaccaaccgggaggtggccctgattctggcagaggaggtggacgctcaggtaaggctggagccggtgctgattctggacggtaaggacacgcgtctggagtttgaggtgggaattacccgtttttatgctgtgcgcgatttgagggcctttaaggaggccgttgaaaatggtgcccatgtggcctatggaaaggacctgtcctttcatcaccacaaatcggcttttacagacagcagcagggaattgctggccctgcttatgggaggggttcaaaaccagaaagcggtccgcagcctgacccttaaccgtatgaaccgggatcagttttttgaaataatgtctggccggaccgcaaaggtccagcttcccggcgggaaccgggtcatgatggatatggaggattctgatcctgtggtctcgcttaaagtggagaagacgggaagggacggcctgaaagccagccttatgggagtggcgccaatgaaaggaagcgaagggccaaggcaggtggcggggtgctttcgcggggagcggtttctgtatgtggtgtccggccagaggctttaccggtgcagcgagtcatgtacccaggtcatggggctgttcatggagcagatgtgcatggagcgggatgaaagcgtgatggtggggcagagagatattccgctgttctatgagcgtgttatcaagcatattcttccgtattgccgtcttatgctggaggatgtggattttaaggattatgagccggagccgttaaaggtatccttccggttcgacacaggggaggatggggctctggtgatggaaccaacccttgcctacggcggctatgaattccatcccctggaggacgagaatcttcccaggacaatatgccgcgatgtgccgggggagtttagggtaagccagctgatccataaatatttcaagtacaaggacccggagggaatacggctggtcataaggaatgacgaggatgagatttaccgtcttatgacagagggaatggacgaattccgttccatgggagatgtatatgtgtctgagaacctgcgtcagtggaaggttctggcgcctcccagggttactgtgggtgcttctgctgccggcggctggctggaactggatgtggatatgggtgacatgaatagccaggaactgaaccggatactggcggcctacagccagaaaaagaagtactacaggctgaaaaacggacaatttctgggactggatgaaggcggtctcacggtcatcagccgtatggcatcggaattgggagtgaccagaaaggagcttcagagcggcaaggtccgtctgccggcttaccgtgccttctatctggattatctgcttaaggagagtaccggcgtaacctattacagggaccagatgctaaaggccatggtaaggtcggtcaagtctgtggaggacagtgattttactgcgccggaaagactcaggggcgttctgcgggagtatcagcgaatcgggtatgtctggctgcggaccctggacagttacggattcgggggtatcctggccgatgacatgggattggggaaaaccatacagattattgccctgttggaggacgcctatggctcaggcgaacagtctccgtccctgattatatgcccggcttccctggtctacaactgggagcatgagatccggcgttttgcgccggaccttaaggtgttatccgtggtgggaagcagttcggagcgggaggtccttttaaatgaggtgggaagaaatccgcaggactatcaggttattgtgacatcctacgatttgctgagaagagatgtaggcttatatgaagccatccacttccggtatcaggtcatagacgaggcgcagtatatcaaaaacgcatccacacagagcgcaagggcagtgaagtctctggatgtgcagaccaggtttgccctcacagggacgcctgttgaaaaccggctgggggagctgtggagcattttcgattatctcatgccgggctttctctttggaagccagttctttaagagggaatatgaaatccctatcgtaagagagggtgacggggctgccctcaaacggctgaagcggctcataggtccctttgtgctgaggcgggtaaaaaaggatgtattaaaggagcttccggataagatggaggaggtggtatattccaactttgaaacggagcagaaaaaattatatgcggccaatgcggccaagtttaaggagaagctcagcacaggcggttttggccaggctggggaaggaaagctccagattttagcggagctcatgcgcctgaggcagatttgctgcgacccgcggttatgttacgacaattacaggggcagctccgccaagctggagacctgtatggacctggtgcgaaggggcgtggcgggaggacataagatattattgttttcccagtttacctccatgctggatattattcatacaaggttcgagaaggagggaatcatgagccacatgctgacaggggccacctccaaggaagaacgaatccggctggtgggagattttggaaaggatgaggtgcctgtattcctgattagcctgaaagcagggggaaccggcctcaacctgactgcggcggatatcgtcatccattatgacccgtggtggaacgtggctgcccagaatcaggccacggacagaacccaccggataggccaggataagcaggtaacggtctataaactgattaccagaaataccatagaagagaacatcttaaagcttcaggaagccaagagccatctggcggatgcagtggtgcctgagggcacgatatcctttggcagcctgacaagagatgatatactgaatatcataaaggaggaataggaaatgaaagtattaatgttaaacggaagtccccatgagaaggggtgtacctacacagcccttgcagaggtggcaggagagctcaaccaggccggcattgaaacagagattatgcatgtgggcggcgggactgtccatggatgcatgggctgcggcgcatgcggtaagcttggaaaatgcatttacagtgacgacaaggtcaacgaagcagtggagaagatgaggcagagcgatgggctgattgtgggttcaccggtacactatgcttcggccggcggggctatcacctccttcctggaccgtttcttctattccggaagcagtgctgctgcccataagccgggagcagccgttgcttctgccagaagggccggaacaactgccaccctggaccagctgaacaaatattttatgattacgcagatgccggtagtgtcctcccagtactggaatatggtgcacgggcaatgtccagaggatgtaaaaaaggatgaagaaggcatgcagattatgcgtgtattgggcaggaacatggcctggatgctcaaatccattgaggccggaaaagctgccggaattacgctgcctgagacagaggaaaagaaacgaacgaattttatacggtaggaaaatggctgatacgtgaaggttagtgcatgaaatcaatacatggaattaatacatgaaatcaggatggactgacttaagactggggcccgcccggcactatggtgtgccgggctttttgagtatggctttatgtacggctatgccaatgcggtatgcatggtctgattatgaatgtgctggtccagtattaaatgaacccgttccacttcaccgagaatcagggtttcggacttcgtgatttggtttcttaatacacgctcagtggatttaatctggaattccagactgtccatgcgggtgttcagggattttatgtcagactgtatattttgtatatcagatttcatgccctgcatttcggcttttacgcctaagatgtcggatttcatgccctgcatttcggtttttacgcctaggatgtcggatttcatgccctgcatttcggtctttacgccttgtatatcggttttcatatcccgaatatcagttttcatatcaattatttcagtcaatatgacatcaagtttatcagaatcagtcaagctgtcacctcctaaaaacagtgtgctgtgtcagtgtgccgaatcgcggtttgtgtttcgtctggaaacagggtgtaattaagtatagcagatcggaacatgtaaatccaggctgattttagcattttttgtaatgattttcaccggatttccccgctggttttcagaaaaaataatgcttgtcacaaatcccccattctgttatactttggtataattaactagctaattatatgcaggctaatggttaatcagtcagatatacggaaaggaggcaatctacatggacaaagcatcacgcagctgttttgttcaatccccggagcactgtctcgtagagaagtacatccgggtggccaggctgcaccggagtatgatggagcgccgcctggacggcacaggggtgtaccgaagccagcatcagatactgatgtttgtgtcggataaccccaacgtatcccagaaagaactggcgaggatgtatggcgtgtccggggctaccatcgctgtttcccttaagaaactggaaagagggggctatatcaggcgcctggtggaccaggaggacaaccggtgcaaccagatttgcataacggataagggaaggaaagtggtggaggacagcgtaaagattttcaggcaaatggagagccgcatgtttgaaggattttccgagaatgatatgaaggtgctgggacaactgctggaccggatatacgggaacctggaccgggagtttacggacagggcacaaagggaggaatcataggtgaaacgatacagaaagtatataaaaccatatcttggagcctttatccttggtcctcttctgatgctgacagaggtggcgggggaaatcatgcttcccaaactgatgtccatgattatcaacaacggggtggttcagagaaacgtgcagtacatcctgtccgtgggagggctgatgatactggctacccttataatggctataggaggaatcggtggtgcctatttttccgtgaaagcagcagtcagctttaccagcgacctgagggacgaccttttttccaaggtgcaggaattttcatttaagaacatagactcatacagcacaggttcgctggtcacccgtctgaccaatgatattcagcagatccagaatgtgcttatgatgggactgcggatggccatgcgcgctccgggcatgttcataggagccctgattatggccttcatgatgaatgccagactggccgtggtcatcctggtggtaatccccctgctgacagccgccatagccgtcatactaaagacagcattccccagatttaccgccatgcagaaaaagctggaccagctaaactccggcattcaggaggcgctgaccaatgtacgggttatcaaatcttttgtgcgggaagagtttgaggaagaaaaattcagggatatgaaccaggatttaaagaacagcagtctggacgccatgaaaatcgtgattgtcaccatgccggtgatgacccttgccatgaacataaccacactggcagtggtgtggtacgggggcaatatcataattgcaggggatatgccggtgggggatttaactgcatttaccacttatattgtgcagatactcatgtcgcttatgatgctttccatggtgttcctgcagctttccagggcagtggcatccatccgcagggtgggtgaggtcatggacacggagatcgacctgacagaccgggatgcatccaggaaggacctggctgtattgaagggaaaggtggagtttaaacatgtgagcttcagctatacggacaaccgggatgagatggtactggaggatataaattttacggcagagccaggtcagataataggcattatcggctccacgggaagcggcaagaccaccctggtgcagatgataccgcggctctacgatgccacaaagggccaggtgcttgtggacggggtggatgtcagggaatattccctcaaaaacctgcgggaaggcgtgggcatggtgctccagaaaaatgtgctcttctcaggcaccatagaggagaacctgcgctggggcaaggaggacgcctccatggatgaaatcagggaaatggcacagagcgcccaggcagacagctttgtcacatcctttaccaacggctatgatacggacatgggacagggcggggtcaatgtatcggggggccagaagcagagactctgtattgccagggccctgcttaagaggcccaaaatcctgatactggatgacagcaccagtgctgtggatacggccacggaggccaggatacggcagtgttttaacaccagccttaaggacaccaccaaaatcataatagcgcagcgcatcggatccgtggaggaggctgaccggattttagtgctggatgaaggcaggctcatcggccaggggacccatgaacagcttatggaggaatgtaaggcataccaggagatttattattcccagagggaccgaaaggagacggctgtatcatgacgagacaacagaaagcggaaagcctgaaacggcgctatggaagacatggtgctcctgaggccaggggtcccatgggagggagaagacatgggccggggcggaatatggcgatgggccccaaaaggctgcccaggaacgcaggcaccaccatcaggcgtcttctgcattatttaaatgaggataaatccaagatgatgctggcatttttctgtgttgtcctcaacacagcgtcaacgctggcaggctcctatatgctgcggcctatcatcaatacattcattgccccgctaacaggaggtcccggggatccggcaggacttgcaagggccctggctgtgctggcggctgtgtttgccgtgggggtgcttgccaattatgcccaggcaaaggttatgctgaccgtggcccaaaatgccctgcagaaaatccgcaatgacctgtttggcagaatgcagaagctgccggtccggttttatgataccaactccaacggtgatttgatgagccgttttacaaatgatgtggataccatcgggcagatgctcagctccacgctggtacagctgttttccggagcattaagcattatcggcaccctgttcctcatggtgtacaccaacctgattctgactcttgtcaccctggtgatgattcccattatgatgaaggcgggaggagctgtggccgggtggagccagaaatactttaccgcccagcagacatccctgggagccgtgaacggatatatagaggagaccattaccggacagaaggtggttaaggtattctgccatgaggatatggccagagaggaattcggcatactaaaccatgatctgaggcacaaccagattcgggcccagtttttcggcggtatcatggggcctgtgatgaacagcctgagccagatcaactattcccttacagcttgtgtgggcggcctgctctgtgtgctcaggggctttgatgtgggcgggctgaccgtgttcttaaacttttccagacagttcagccgtcccatcaacgagatatccatgcaggtcagcaatgtattctcagccctggccggagcagagcgtgtatttgcggtgatggatgaggagccggagccggccaacaccagggactgcatagtgccaagtcctatgattggccatgtggtgtttcatcatgttacctttggctacgatccggataaaaccattctaagggacataaacctctatgccaaaccggggcagaagattgcctttgtaggatctaccggcgcgggaaagaccaccataacaaatctgctgaaccggttttatgacatccagtcaggctccatcaccattgacggggcggatatacgaactatttcaagggatgccctgcgaagcaacattgccatggtccttcaggacacccacctttttacaggcacggtgcgggagaatatccgctacggcaggctggacgccacggacgacgaggttattcaggcggcaaaaacagcatccgcccactcctttatcatgcgtcttccccacggatatgacaccatgctggagggggacggggccaatttaagccagggccagagacagcttctcaatattgccagggcatccatatccaaggctcctgtgctgatactggacgaggccaccagctccgtggataccaggactgaaaaacacattgagcacggtatggaccggctgatggcggaccgaaccaccttcatcattgcccacaggctgtctacggtgcggagcgccaacgccattatggttctggagcagggggaaatcattgagcggggaacccatgaggagcttctggagatgaaaggacggtactacgaactgtatacaggcatgaaagaactggaatgattgccatgaaattaacatgtatttaacatataattaaaaaaataacatatataatctgtattgtatacaatctttatttatgctatactaaattggtgtattccggcgggggcaggcagccctgccggtcataccgggcgctggtactggtccggccgcacaaaggaataaaacaaagaaaagagggagagaatccatgggtttggcgacttttataggcggcatccatccatatgaggggaaagagctgtcagagaacaaaccggtacaggtcctgatgccaaagggcgacctggtgtatccgatgtcacagcacattggtgcacccgcgaagcctctggtagcaaagggcgatcatgtactggcaggccagaagattggagaagcaggcggtttcatctctgcaaatgtaattgcttctgtttcaggaacggtgaaggccattgaaccaaggcgtatggctaacggagcaatggtgccctccattgtggttgaaaatgatggagaatataagacggttgagggcgtaggagaggacagggacccatcaggcctgtctaaagaggaaatccgcaacattgtgaaggaagccggtatcgtgggtctcggcggagcaggattccccactcatgtaaagctgactccgaaggatgagaacgccatcgagtacatactggtcaacggcgcagagtgtgagccgtacctcaccagcgactaccggatgatgctggaagagccggagaaaattgtaggcggcttaaaggtcatccttcagctgtttgacaatgcaaagggtgttatcggcattgagaacaataagccggaggccatcaagaaacttaccgagatggtaaaggacgagccgcgcatcacggtctgtccccttatgacaaagtatccgcagggaggagagcgttccctgatttatgccgttacaggcaggaaggtcaactcgtccatgcttcccgcggacgcaggatgcatcgtggacaatgttgacaccgtgatttccatttacatggcagtgtgcaagagcacgcccctgatgaggaagatcatcacggtcaccggagacgcggtggcagaccccagaaatttcagcgtaaagcttggaaccaattaccaggagctgttggacgcagccggcggttttaagacggagccggaaaaggttctgtcaggcggccccatgatgggccaggccatatttgacctgaatatcccggtaagcaagacttcgtccgccctgacctgcttcacaaaggaccaggtggctgagatggagccttccgcatgcatacggtgcggaaaatgcgtcagtgtatgtccaagccacatcatccctgtgatgatgatgcaggccgctctcagggacgactgcgagacattcgagaagctgaacggtatggaatgtatggagtgcggaagctgcacctacatatgtccggccaagaggcctctgactcaggcatttaaggaaatgcgcaagacagttgcggctaaccgcaggaagaaagggtaggaggggacataagtcatgagtaaattattaaacgtatcatcatccccgcatgtgagaagccatgagaccacccacagcatcatgctggacgtggccattgccatgttgcctgcaactgctttcggtgtgtatcatttcggcatgcatgcgctgctggtgcttatagttacggttgcagcctgtgttttaagtgagtatgtatatgagaagctgatgaagaagccaagcaccatcagcgactgcagtgccctggtcacgggcctgattctggcactgaacatgcctccggagattccggtgtggattcctgctctgggtggaatctttgccattatcgtggtgaagcagctctacggcggcctgggacagaactttatgaacccggctctggcagccagatgcttcctgctgatttcctttgcgggaaaaatgacaaatttcagctacagcgggtttgacggcgtgtccggcgcgacccccctggcagtgcttaaaagcggcgggaccgtggatgttccggccatgtttgtgggaaatatcccgggcaccatcggagaggtttccgtgattgcccttttaatcggcgcagcctatcttctggcaaagaaggtaatctccatccggattccaggcacctacatactgacggttgtggtatttgccatcctgttcggaggccatggatttgatttaaattacattgcagcccatctgtgcggcggcggcctgattttcggtgccttctttatggcaaccgactatgtgaccagccccatcacgccaaagggccagattgtgtttggtatcctgctgggcgtgctcacaggactgttcaggattttcggcggctccgcagagggcgtgtcctacgcaattatcatcagcaacatccttgttccgctgattgagaaagtaacccttcccaaagcatttggaaaggagggcaagtaattatgaataaagcaggatttatgaaagacgcgctgatcctttttgtcatcacactggtatcgggctgcctgcttggcggtgtgtaccaggtaactaaggaacccattgagaaggctaccattgctgccaacaacaaggcttacaaggcagtatttaacgaggctgagtcatttgaaccggatgatgcccttacagccgcggtcgagggatgcaacgcagacctggccggcatggattttggcggcgtcaaggtggagaatgtgcttaaggcagtagacggcagcggcagccagctgggctatgtcatcacttccctttccaatgacagttatggcggcgctgtgaaggtatccgtgggcattaaggaggacggcaccattacaggaatcgagttcctggaaatcaatgatacgccgggtctgggacttaaggccaaggagcctaaattcaaagaccagttcataggcaagaatgccgaatccttaagtgtaaccaagatggggaatgcggacgacacccagattaacgcaatcagcggtgccaccattacttccagtgcaacaaccaacgcagtgaatgcagctttatattacctgcataactgcatcaaataattaggaggtgggaatatgaataactgttctgaacgtttatataacggtattgtgaaagaaaaccctaccttcgtcctgatgcttggtatgtgtccgaccctggccgtaaccacatcagctgtcaacggccttggtatgggactttccacaaccgtggttttactgttttccaatatgattatatcagcactccgtaagattataccggaccgcgtgcgtatcccggcatacatcgttatcgtggcttccctggttaccgttgtgcagctgctgcttcaggcctatgtgccgagcctgtattctgcccttggtatctatattccgctgattgtagttaactgtatcattcttggccgcgcagagtcctacgcatccaagaacggcccgcttgtatccacctttgacggtatcggcatgggcctgggctttacccttgcccttacatgtatcggccttgtccgcgagatccttggttccggcgcaatcttcggcaatgtagtgattcctgaggattaccacatcgccatctttgttctggctcccggcgcgttctttgtccttgcagtgctgaccgcccttcagaacaagttcaaggcgccgtcagcgaccaacggttccgttccccagtccagactggcatgcggcggcaactgtatggagtgcacgggttcctcctgcatgtccaaccatgaagtgctggagaccaggaagcgccaggcggaagagaaggcccttgctgcaaagaaggaagccgtagcaaagaaggaagcagagttaaaagcagctacttccaagaaagaaaattaggagggtggataaatgaaagagttattgttaattgccattggttccgctctggttaataacgttgttttgagccagttcttaggactttgtccattcctcggtgtttcaaaaaaggttgagacttcagccggtatgggtgcagcggttattttcgttattaccattgcgtccgctgtgaccagcctggtgtatacagggattcttgtgaatctgcatctggaatatctccagactattgtattcatcctggttatcgcagccctggttcagttcgtggagatgttcttaaagaaatccatgccgtcactgtatgaggctctgggcgtatacctgcctctgattaccaccaactgtgcggttctgggcgttgcccttaccaatgtgacgaagtcctataacttcgtgcagagcgttgtaaacggtatcggtatctccgttggttttaccattgctattgtcatgttagctggtgtccgcgagaagattgagcataatgacgtcccatattcattccaggggtcaccgatagtccttattacctcgggtcttatggcaatcgcatttttcggattttccggattaatttagaaggaggagaaggaaaatggttacaggtattataatagcggcagccgtggtaggtatccttggtattctgataggtgtcttcttaggcatagccagcgagaagtttaaagttgaagtagatgaaaaggaaatcctggtccgcaacgagctgcccggcaacaactgcggcggctgcggatatgcgggctgtgacgcactggcaaaggcaatcgcagccggccaggcggatgtaggcgcatgtcctgtgggcggcgcttccaccgcggagaaaatcggagccatcatgggcgttgcaggcggagctgccgagaagaaggtggccttcgtgaaatgtaaaggttcatgtgacaaaaccgccgtacagtacaactattacggtgtggatgactgtaagaaggtatctgttgtcccgggcgccggcgagaaggcctgcgcatacggatgtatgggctacggctcctgtgtcagggcatgtgcctttgacgccatccatgtagtggacggcgtggcagtggtagataaggaaaaatgtgttgcctgcggcaagtgtgtggcatcctgtccgaaccacctgattgagctggtgccgtataaggcagagcatctggtacagtgcagctcccacgacaaaggcaaagatgtaaaagctgtctgtgcggccggctgtatcggatgtaccctgtgtacaaagcagtgtgagtttgatgccatccatatggagaacaatctggctgtcattgactacgagaagtgtaccaactgcggcaagtgcgcagaaaaatgtcctgtcaaggttattgtttaggcgagataaaaatatcggaatgaaataaaaagctgtcccttccgggtgatgaaccgcggaaggaacagcttttttgctgcatttgtatgttattttttctttctctttttaaaagccggtgaatcaaaggactggtcgtcgggcaggaccttcttagtggtggcctccaccagattatcgtagcaggaaaagatggcgtttatgtccctggagtccatccttggcgtcaggagggataccagaggaacgataatgagtcccacaatcatggagacagcacctgcattgatgggggacgcaatatagtgcaggaacatatttgaaaccgtgataccgatgccggtggcaaagctggcccacacagccgcgggcgtggttcttttccagtacaggccgtagaggaagggagccagaaaggctccggccagcgcgccccaggagatacccatgagctgggcaatgaagtcaggcggatccagggccaggacaacgcttatgacgataaaggccacaatcaggcactgcatcagcaccagctgggttttatccttcatgttcttcacaagactgcctttgataaaatccagggtcagggtggagctggaggtgagcaccagggaggaaagggtggacatggatgcggacagcaccagcatgacaacaattccaatcagcaggtccggaagtccggacagcatggccggtatgatggtatcataagccacggatccatttccattataaatggcagggctgtcaaagagccggccgaagccgcccaggaaatagctgcccccggagatgacaatggcaaacagggtggaaatcacggtgcctgtggcaatggctttttcgcttcggatggtatagaatttgtgaatcatctggggcaggccccaggttccaagggaggtgagaatcaccacgcccagcaggttcaggggatccggtccgaagaaggaggtgtaggctccgggctggcccagggtaaccgggacctcgctgggaatctgcgccagtctgcccacagcagccgtaaatcctccctggccgcttaaaacgctgaggatgatggcggcgatgccggccagcatgatgatgccctggatgaaatcattgatggccgtggccatataaccgcccaggatgacatagaccgctgtcaggatagccatgcccatgacacagacactgtagggaatatcaaaggccatgccgaataaccgggacagaccattgtagacagaggctgtgtagggtatgagaaagacaaatataatcagggaggcaacaatcttcatgccctggctgtggaaccggctgccgaagaattccggcatggtggccgaggagagatgcttgctcatgaccctggtccgccgccccaggatgacccaggccagcaggctgccgatcagggcattgccaatgccaatccaggtggaggccaggccgtatttccatccgaactgaccggcataaccgataaataccacagcggaaaagtaggaggtgccataggcaaaggcggtgagccagggccccacgccccttcctcccagaacaaagtcattgacattggtggcatggcgacgggaatagaatcccactcccagcatgatggcaaaaaagataaccagcatcagcagtttaacagtcatttgaatatcctccgcatacactttaataattaaaacttctgaactttaatgtatcaaagtacaaggggattgtcaaagggtatttcttatttttgcctactttggctattttgacggaacttcgtgaaagagaatgaggtgcaaaatgccatttttttgttaaagtgggggatgactgtcaaatttcgacaataaatgtaaaatccaaagatggatataaaatgtaaaaaatgaataattaaggtataaaaagatttacataatataaattacaaaaataggaaatcatgtaacatgtttaaaaattaataatactgtaacataaatgtaaagatatggctggcgaaatgcacaaaataaaggtgcagacacctggaaaaccatagtaaatatataaaaaatattacaaatgtttcaaaagtaagaaaaaatgtaacaaaattattaaatctccattgacgcgaaaagtcaaatcccatataattagccatacatcccggaaaaacatgcacaaagtgggagatacccactgcataaaattttgagaatggtacctgtacagagttgtgcggggccaggaaagaggagtatgtatgcttacattacattcattccttcgttcggtagttctctttgttaagtcactgactgtgaaagtgacaaagcagatgtaccgttcctcatcggtggtgatggcgggtatgatggtagtggccatcatagcattttcagccaatgggtttggcggcgggggaagaaacgccctggcagcgcccatgacggaggaaagtgacgccattgacatggcggaggaggaaaacgaaggaagcggtctggttactgaagcaaaagtacaattcggacatttaaacacagacagtgaaggccagcatctggccggtgcgctgctggaagcggacgtccgagagaaacagagaaagcaggcagctgcacagacccagattgagacacttcagaaacagatattaaaggagagacaggaagaggaggccaggaaaaaggcggaggaagagcgccgggcagccagaaggattaaatatacggatgaagattaccaggtactcctgcgcattgtccaggcggaggcgggaatctgcgaccccaagggaaagatactggttgcggatgtgatcattaaccgtgtcctgtcgggaaaattcccggacagcgtaaaggcagttgtataccagccatcccagtttcagccggtatccaacggcaccatcaacacggtaaaggtcacagcggaaaccattgaatgcgtggaccgtgccctggccggtgaagattattccaacggagccctgtattttatgaacagaagggcatccggcagtgctgcctcctggttcgacaggcggctgacctacctttttgcccatgacggacatgagttcttccgataatcagataaaaaaggattgagtttcctgcggctttaggtgtatactaggaattggaaaatcgaaatgccacaaaggagaatggaatatgatttttgatgagaagaagaacctggacttttacaggaatttagggattgaaggcagatatgccaaggccgtggatttccttcagaatacggaccttgaggcattggagccgggaaagtatgagattgacggcaaaaacgtgtatgccaatgtaacagcctacaccaccatcccgtgggaggaggctaaatatgaggcacatgagcattacaccgatatccagtacgtgattgagggcagcgagattatgagctacgcgccggtacatgagatgactgtaaaggttccatataatccggataaggatgtggtattctttgagaacaccacccccggacttagggttgtgaccggagccggacagtatctgatttttaacccatgggatgcccataagccaaaggctgccaacggagagccggcaccgattaaaaaggtgattgtaaaaatcaaagaggattaaaaaatatattaaatgcgtaataaaacgtgattgaagcgtgattttaagaaagcgcaggaaaaaaggccggcccgctgtatccggtatcagcgggccggtccttttttatgcccctggagactacctcatgtttgctgatatttcattgctaatattttgttaattgaaatattgacttttaattcacaaaatgagataatgaaaaggatttcgataaaatgaaagagaggtaaatgaatgatggcaaatgtagatttgagtcagtatggtattaccggaaccacagaaattgtttataatccttcctatgagatgttatttgaagaagagactaaaccaactctggaggggtatgaaaaaggccaggtaagcgaacttggtgcagtgaatgtcatgactggtatttacacaggtcgttcccctaaggacaagttcattgtcatggatgagaactcaaaggacactgtatggtggacaacggacgagtacaagaatgacaatcatccggccagccaggaagcatgggatacagtaaagaagattgccctggaagaactttctaacaagagactgtttgttgtagacgcattctgtggagcaaacaaggatacccgcatggcaatccgcttcattgttgaggttgcgtggcaggctcatttcgtaaaaaacatgtttatccagccaagcgcagaggaactggagaactttaagccggatttcgttgtatataatgcttccaaggcaaaggtggaaaattacaaggagttaggcctgaactccgagacagccgctatgttcaatattaccagccgcgagcaggtaatcgtgaacacatggtacggcggagagatgaaaaaaggcatgttctcaatgatgaactattatctgcctctgaagggcattgcatccatgcattgttctgccaacacagatatgaacggtgagaacaccgcaatcttcttcggactttccggaacaggaaaaaccactctttcaacagaccccaagcgtcttcttatcggtgatgacgagcacggctgggatgacaacggcgtatttaacttcgagggcggatgctatgcaaaggtcattaacctggataaggattctgagccggacatctacaatgcaatcagacgcaatgctcttttggagaatgttacacttgatgctgacggcaagattgattttgatgacaagagcgtaactgagaatacacgtgtatcttatccgattgatcatattgagaagattgttcgtccggtatcagctgctcctgctgcaaaggatgttattttcctgtcagcagatgcgttcggcgtactgcctccagtatccgttctgactccggagcagacacagtactatttcctgtccggatttacagcaaagcttgccggtacagagcgtggcatcacagagcccacacctacattctcagcctgcttcggacaggcattcctggaactgcatccaaccaagtatgcagaggagcttgttaagagaatggagaagagcggcgcaaaggcatacctggttaacaccggctggaatggaacaggcaagcgtatctctatccgcgatacccgcggtatcattgatgcgattcttgacggctccattgcaaaggctccaaccaagcagcttccattcttcaactttgagattcctaccgagcttccaggcgtagatcctaagattctggatccccgcgatacatacgcagaggtatcacagtgggaggaaaaggcaaaagatctggcacagcgttttgtcaagaactttgcaaaatatgagggcaacgaggctggaaaggcactggtttccgctggtcctcagttataatcataaaaatcatctttctgccccgcggcaggaggacagcatgatagagggagaaccggatgtccggttctccttttcatacagtccaggtgcccaatgactttccctggagctgacatttcttaatattttatactgtttcttaagtctcatttacgtccattgaaaggctgtttttttcatgataccatgaaaccataaaggaggatgggttatgaaaaaatggaaaaagaagcgtacatggacgctggcaatgacgctggttcttctggcactgctctctctgtctgcctgcggcagcaagctgtccaatacggcagccacggctgagaccatggctgcaggatatgctatggatgtgagggaagcagcgataaccatggcccctgcgggagaagacctgaatgggttaaaggctgagagcggaagcggtctgtcaccctcgccggacatcggaagtccgggggaagcaggcaggaagctgatacgggatgtgagtatgaacgtggaggccagggactttgacggtgtcctctcccagattacagatcaggtaggggagctgggcggttatgtggaatcctctgatgtgtcgggagtcagcgtcgattcctatggcggcagccagcagcgccatgcggacatcagggccaggattccggccgaccggctggaccgctttgtagagacggtggagagcgcgggaaatgtgaccagcaagcaggagcaggtgacggatgtgaccctgcagtattcggatacggagagccgcaagaaatcgctggagatagagcaggaacggctttgggccttgctggaaaaagcggagtccctggatgcggtggtggctctggaggcccggctctcagagatccgctatgagctggagtcctacacatcccagctgcgcctctatgacaatcaggtgcattacagcactgtatccatctatatgagggaggtaaaggaccttacccccactgcgccggacagcattggaaccaggattcagaagggctttaaccgcagtctgaataaccttggggaggccgtaactgacctgattgtatggcttgccgtcaacagtcccatcctgttcgtactggctgttatcattggggcggttgtccttattgtcagaagactgagccgaaagctgcggggcgggaaccgatccccaaggcgtttctctccattccgcggcaagcccatgggaggaaagaagggcgcaaaggaccagaaggagcaggcggagaaaggacagccggagaaagaaccgccggagaaagaaccgccggagagggaacaggcggagaaagaacagaattaagataaaaaccaatatggagggcaggacacacagccggcaaaaacaggcttgtgtcctgcctttttatggcgtatactcatagtaataatccacagcaataatctgaggatgcctgaaaccgtgttcccgccggattcaggaaatccggcagatttcccgttgcctgtcaacaccatatatacccagggaaaggagaacctcatgcagcttacctatctgcgcatccacaattttaagtctatacgaagcatggaaatccgggatatagagcgggcgctgattttagttgggaaaaataatacaggaaaaacctcggtgctggatgcaatctgcgcggtgtgcggctgttatgagattcaggacagggattttaatgagaaccgtcaggccatccggattgatgcctgcttttccatagaggaggaggatctgcacctgtttcaccatatgggtattgtcagccagtacagacgttacgatgtgtggcgcagggtattttctgagcggcttccgtcgttccaaaacggagagctgtcctttacctttcacgtgaaccaggacggcaaggtgcggtacgaggatctttataggaagaataacccctatatccatatggtgatgccccgcatctaccgcatcaatgcggagcgggagctgaaccagctgcagaacgaccttctgatgttccaggaggacgaggagcttcgaaggctgcgatccggcagctgtatttttgagcgggctaagaaatgcaaccattgtttccagtgcatcggcctgattaataagaagaaaccggaagaactttccgcctttgagacggccagactcctggagtttaagatataccagatgaacctgagcggattttccggaaaggtcaatgaaaatttctttaaaaatggaggatacgaggagatacagtacacgttaagctgcgatgcggaccagctttttaacgtggaggtaacggcccataaccgccagagaggtaccgtgaagccggtggagctgatgggaaagggcatgcggagtatttatatgctttccctgctagagacctatatcagcgaacagggccggattcccagcattattgtggtggaggatccggagatattcctccatccccagcttcagaaaacatgcagtgagatactgtaccggctgtccaagaaaaatcaggtcattttcaagactcacagcccggaccttttgtttaatttcagcatacgccagatacggcaggtggtgttggatgatgagcggtactcggttgtacgcccgcggaccaacatgagcgaaatattggatgacctggggtatggggccaatgatctgctgaatgtcagcttcgtgtttattgtggaggggaaacaggacaagagccgcctgcctttgcttctggaaaagtattattctgagatttatgatgaggaaggaaatctgtaccgcatatccatcatcaccacaaacagctgcacaaacatcaagacatatgccaacttaaagtatatgaaccaggtctatctgcgggatcagttccttatgatacgcgatggagacggcaaggatccggaggagctggcatcgcagctgtgcaggtattacgatgagaggaatctggaggacgtggaccgcctgccgaaggtgacaaggaagaacgtgcttattttaaagtattattcgtttgagaactatttctttaacccggcagttatggcccgcctgggaatcgtggaaagcgaggatgttttttaccggaccctctatggcaaatggagggaatatctgtaccggattcgcagcgggcagcagctgatggaagtcctgggacgggatttctcatccccggaagatatgaaggagcacatggaagaggtgcgcacctttctcagaggccataatttatatgatatattttacggcccgttcagggacagggaaaaagagattctgagggcctacatcgacctggcgcccaaggaggattttaaggatatactggatgccattgaccggtttgtctattttgacagcaggaaaagacctgaggatgaaaggcaggcagagaagagtatgatgtaaaaaggacataacagaaagaggatataacagaaaaaggggcgctgcccatggccggataagtctggccggggcagcgcccttttatcgctttcttatatgaagagcgattcaaacgttcccttaaaccccataaggttcttcaaccgcaggactgtctgcgttctttcccttgcccatcacgcaggtgaacacaaaggttcccaggcacactgctgcaaagatgatgccggcaggataggcgatggcggtggagagctggaagccttcctttgccatcaggatataggtacaggatacagccgacatgaaggtggccggaagggcggtgagccagtagaagcgttttctgcggaacagatatacgcttgcggcccacagggcgatcatagccagtgtctggttgctccaggagaaatatctccataccacctgtacatccacctgggtcagaacagcgcccacggccagcagcggaacagttaaggcaagacggtttttgatgggtttctggtcaatcttgaaccagtctgccagggtcagtcttgcactgcggtaagcagtatctgctgaggaaatggggcaggcgataacaccaatcatggcgatgacagcacctaccggtcccagaagcttgaagcagatttcatacacaacgctggactgtccgttgccaagggcctctaacagaccgcctgtgccgttgtagaacgccacgcctgcggcagcccagataagggcgatgacgccttctgccaccatggctccgtagaataccttgcggccgtccttttcattggtaagacaccgtgccatcagaggagactgtgttgcatggaagccggagatggcgccgcaggcaacggagataaacatggtgggccatataggagtgcctgaaggatgcaggttggacagggtgatttcaggaatgtgataaccgcccaggataatggctcctcctacgcccagggccatgacgatgaggcagataccgaatatcggataaatcttgccgattaccttgtcgatgggaacaaaggttgcgatgaaataataaatcaagaccactgccagccagaatttggcatccaatacattaggggtcagcatggcaagcaggttggccggtcctgtggagaagcttacgcctaccagtaccagaaggactacggagaatacacgcatgacctgtttcatggcattgcccagatatgtacctgtgagctcggatacgctggcgcccttgtggcgcatggacatcatgcccaccatgtagtcatggacacctccgcctaacaaggtaccgaaggtaatccacaggaatacgctggggccccagcaggcaccggccagcgctccgaaaataggtcccagaccggcaatgtttaacagctgaatcaggaatatacggggagtgcccatgggcacatagtcacttccgtctgtcatggacagtgccggcggctttctgtcatcagggccaaatactttctcggcaaccttactgtagagcataaatccgataatcaaaattgccagacatacaaaaaaactaatcatatacctacctcctatgtatttcttgtatttgtaataattatacaataataggagtgaaagtgaatgttttttgtatcaactgtatgaaggagtgaacaaacagtaaaataaagttcataaacggaaggcaaaatggcccataaatcatgtatggggggattataccccgatgatctggcgcagcatttttgacttttccctgctcacaggaaggatattcttctcaaatccctgcatttttacagccagactgttgttggcccagggaaagagttcggtgatgaagctgagattcaccagatagcttttgtgtatgcggcagaaaccatggggagccaggcgtttctcgtactcccctaaaagaaggttttccgtgtagtcccgggtgggggtatggatgatgcagcttctccctgaagtttctatgtatacaatctgctgtatatccaccagtataatggtccggttcatattgatgggcatacggctggctggaaaggcggctgtgaccggatctcccgcctcctgctgggaggcgtataaagaggatgaagccggcctgcaggactcgccccagggctggtgatcgtcgcaggagcagacagcagaagcggtaagggcctggtttttctgcaggtccttttgacatttttccaggacacggcgcacccggtccgggtcaaagggtttcagtatgtagttgtttacgcccagctcaaaggccttgactccatactgggagtaggcggtggcaaacacaatctgggcatcggggagaatccgcctggcggctgccgccagagtggtgccatccatatcccccaggctgatatccacgaacagcaggtcaaaggtccggcggctgataagttcaatggcagaggcgccgctgtcagcctcctcaatctggctgcccggcatggcgtccataatctggtggaccagttcctttctggccggacgttcatcgtcaatcacagctatcttcattgtatgattcctcctgtttgatttcatgggatgggacaggaatttcttccggttccaaagggattcggaaccagactctggaaccggcttctgaagtctcgattttcagaccgttatcttctccatatatgcttttcaggcgtttgtgcacattggacaggccaactccctttccctggccagtgtaaagtcccagcaccacttccctggggataccctgaccgcggtcagccactgagatttccgccatgccttccacactgtggacgctgatggaaacatggcgggcgccggtcctgtccccgccgtggcggaccgcgttttctaccaggggctggaggatgaaggagggaaccttgcagttgaggtcgtcctccacatccagctccacaaccagtttttcctcaaaccgcgcctgctccagttccaggtaactggccacatggtacagttctgtgtgaaggctcagcatgtactggtcgttttccagggcctggcggtagtaggaggagagggttagaatcagttccctggcccggtccggattctcccggcaaacgcatgaaatggtgttcagcgcattgtaaaggaagtggggattcacctgggactgaagggccttgaactccgctttgcggcggagctgtttctgataatccaggtcggacagctctaactgggtggagaaaagacgggccagctccgaggcaaagtccagatttgactgggaggtatgccagtgtttctttaccatcatggtcagactccccactggtttgtccatctcgatgagaggggcggcaacaatgatgtggttcttcaggatatggtacagggggtctgtcttttccgcataggaaaaggtggtgggcttcctgtcgtggatagagcttagaatgggcttcagcacagcttcatcccggaggacatcgtaccagttctcacccttcatggccaggattttctgggcatccgtgatcatcacagccgcacaggaagtggactggtaaatgatgtctgcggtggcctccatatccgcggtgctgtagagtccctttctcaggtgaggcagactctggtccacaattcccatggccagacgcatcttctccgcgaactggctgtcctcctccatgaataccatattaaaggtgcccagaaatacaaccatgcccagggcattcatgattatcatgggaaaggcaatgaggcgtaccaggtccagggcagcagggaagggccgggagatgagaaggataatggccatctgcccaatctcagccagagccgtgatgagaaataccccggcaccgtcaatcttgccggccttaaaccgcttggaaaaggcggaaccgatcaggccctccacaaaggtggagacagcgcagcttacggcggtaaatcctccgatatcaaagagataccggtgaagtcctcctatgacggcggctccgattcccacataggggccgcctaacagacctgctgccagcacgccgataaccctggtgttcacgatagcgccctgggcacgcacccctgtgtaggtggagaaaatgctgaccagtccgaatatgactgccagggcggccctgcttcccatggcatggctgtcctccagcagcatggagcgaaccatggggagcttggtgagcatggtggcaatgagtaccagaagaccaatatttaaaagcaggttaaaaaacatggtattggacatgatgacctcccttaatcgttctcacaccagtataccaaaaaatcaatcttaagaaaatctttaattgtaaatcttggaagactatggtaatctaatggggaagataactgtattaatatacttaatacagatgggacaccgggaggatcgggatatacctggtccatgacatggcgggggcattgctgaggccgctgtcaggcatcccggcagcgagaacagagagggggaaggacgggatgattgtactggattacagggacagcaggccgctgtatgagcaggtggcggagcggcttagggagctgatgtttaagggtgccctaccgcaggatgcgcagctgccgtctgtgcgcagccttgccacggagctgtccatcaatcccaataccatccagagggcgtatacggagctggaacgccagggatatatttattccatcaaaggcaagggcagctttgtcgcggataacagccggatgaaggcgggaatccttcaggagtggaaggggcattttaactctgctgtggaggaaggcataaaggtaggcgtcacagcaggagagatgaaggaaatgattgatacggcctgccggaatcatgccatggaaaggggagagagtaatgattgaagcagtgaacctgacaaagcggtttgacgatatcgtggcagtggaccatataagcgccaccattcgggatggcagcgtgttcgggctaatcggtaccaacggagccggaaagtccacatttttaaggctggccagcggtgtgctgaagcctgaccagggatgcataaccattgacgggcatgaagtttttgagaatatcccggcaaagaagcgctttttctatatatcggatgaacagtacttctttaataataccactcctgtggagatgatgcgttattacagtaaggtgtaccagggatttgacgaggcgcgtttccacaagctgatgggaaatttcggcctggacgagaagcggaagatacacaccttttcaaagggaatgaagaaacaggtatctgttatctgcggtgtttgcgcgggtacggattacctattctgcgatgagacctttgacgggctggatccggtgatgcgccaggcggtaaagagcatatttgcagcggatatggaggacaggaacctgactcccattattgcttcccataacctgagggagctggaggacatatgcgatcatgtgggactgcttcacaagggcggcattctcctgtcaaaggacctggacgacatgaagcttaacatccacaaaatacagtgcgtccttaaaccggatatgaagccggaggacctgacgtcccttgataaggtaaatgtggaacagaggggaagtctctgcaccattacggtgcggggaagccggagcgaggtagaggccgttatggcttcctatgagccggtattctttgagtgcatcccactgtccctggaggaaatattcatcagtgaaacggaggtggctggttatgacatcaggaagcttatactttaagctgctaaaggaggatttcaggagaaggctgtgggccattgccctggtttttctggcatttttcttcactcttcccattgggctggccctgaacatggagaacgcagccaacaccaattactacaggtacaatgattatgaaccttttatccaggacgccgccatgaccgaccttcagtacaagacaaggcttctggaactgaagacagaggtggtattaaatggtgtggaatacgggaacggcatgattgcctttttgatgataaccgcggcagtggtcatcggcgtatccagctttgcctatctgcataataagaaaaaagtggatttttaccacagtattccggtgaggcgggaggcactgtttggggtccagttctcaggaggcatatttattgtcggcgctgcctatggtctgaacctgctgctgcttaccggggtggccatgtcctacggcgtgcctgcgggcaggatactgggcgccatggccggtggctgggctcttaacatgctgtattacgccctcatgtattcaactgctgtggcagccatgatgatgacgggaaatattgtggtaggcgttttgggaacaggcgttttctttttcctgctgcccgggattatgctgcttctgtgttggtattgcggaacctttttcgtcactacggccagatatctgtggagttcggatcagtcgccttttatgtggggggtcaggtacctgtctccattcagcgtatacatcaattcctttggctggaagatgaacgaactgtcaaaacatgttccggagctcatctgtacggtactggcatttttggcagttaccacactggatttggggctgtaccgcaaacgtccgtcagaagcagctgggaaagctatggcatttaagaaatccatgccgcctatccgtatactgctggtgctgggaattggtctggccggaggcatgttcttctggtcgctgcagagcaggctgcgctggggactgttcggaaccatagtatcagtggtgctgacccactgcatcgtggaaattatctatcattttgattttaagaagatgttcagtcacagactgcagctgggactgtgccttgcagctggaatcctggtattcttaagcttccggtatgactggtacggctacgattcctatattccgtccaaggaaaaggtcgtatccgccagcctggatatcagtgtggacagcagatggctctcggataagacctttgagacaggcagtgacggaaagctgcagatacgatatgcagacccatatgaatatatagaagaaaacatggtgctcaccgataaagaggctgttatgtccatggtggaagagggaaggaagcgcgccctcgagagaagggatgagcggctgggcatacgcaaggcagtggcccgggttgacggctatcataccaatgcagccagttccatcagctatatcggcggggcggacggccccacctccatctttttggcaatgaagtcaggcggaggggaggattcggaccaggagaaatttgagaccaatatgacggtatgctaccgcctggtaaacggccgtgaggtgagacgttcctattccctgcctctgtctgccgtgatggattcctatgaggcattgtacagacaggatgcttataaggaaggcatgtacaggattttaagccaggaaccgggacaggtaaaacagattatgtacagggaggcggaccaggtcacggatgtgagccaggacagccgtgtccaggaggccgtgctaaaggcgtatcagcaggatatgagggagctgaccgtggaggagcggctggtggagatgcctgtgggcagccttatgttcatgacagaccaggagaatacctatctccagcagcagcgccaggcagccaggtcgtcatttggcggtatagcgcggtatcaggtggaggatgtgagccagtactggccggtgtacccatcctttgagcggaccattacgcttttgaaggagcagggaatagaacccggcacatgtctggcgcctgagaaggtggagcgcatcgccattgacgtgcagaattatttttatgaacagcagggagaactgccggagggagagaccctggcagaacttcagaaaatcaatcccaactaccaggaggacggttccctgatatttgaggattcccataccatcggtctgctgctggaagccattgcagaagatgaaagcagcggcatgaattacctttgcgagacagtggagggaggcccccactgtaccataaggacagagaaagaagcaggagtgggaggcttgcttataaagaacagaatcactcctgagatagcggaactctttaccggtattcccatgaataacgggaagtagacggtcagaagaggactgaacacaaaaacagggaatcaaccacgttatggtgattggttccctgtttttgttattgcggcactatctgtccggcaccgctgcatcccgtttaaacacatcgctttaggaggaacatcccccgcatccgctgcatccgctttttggttcccgaacagtgccgaaaacctgttcatgaagacgccttcccgtaggggtggcagccaggccgccctcggccgtctcctttaaggtggaagacatggcgtcgcccaccttcttcatggtccagatgacttcatccgcaggtatggcgctttcgatgccggccagagccagctccgccgccacaaaagcacctgccacgccggaagcattgcgcttgatacagggaatctccaccagcccggctaccggatcgcatacaagtcccagtatattcttgatggcaatggcgatggcatgttccgccattttcggggtaccgcctgccagctccacgatggcagcggcagccatggcggcggcagagccgcattcagcctgacatccgccctgggcgcctgccagggaggcattgttggcaatgaccatgcctacggcagacgcggtgaacagggacatgacacagtctctttccggaatctgtttttctgcctgcatggtcagcagggcggcgggcaggatgccgcagcttccagctgtgggggcagctacaatccgtcccatggcagcgttgagttccgagacagccagggcgcggtacagggcaccggagagaaaggagccggtcaggctctttccgttttcagatatccggcgcatcttataggcgctgccgccggtcagcccgctggtactttttaggtctttattgcagccgggatcaatgcactctgtcatgacctggtaatttttccgcatatgttcatatactgattcctctgtctgctccatctgttccgcctgctgcctcagtacgatggcagagatgggaagaccgcttttttcggcggcagctacgatggatgccacggaagagtaattgaattcaggttccataaatataattcctcctgtaattatgggtttcatcagctatatgggctgaagcatggtgctggagaaaatgttgggcagcactttgattttctcgttcagttccggtccgaaactgccgtcaatttcaatggtcatcacggcttcgccgccccggctctgcctggacaggcggaagttgcagatatttaccccggcgtctgccatgacttccgtgacagccgcaatggtgccgggcgcgtcgcggtggagcacaatcagggttgtgtgctggccggtgatggatacctccatgccgttgacttccttgacaagtatattgccgccgccgatgctgcttcccaaaagagagactgtgttgcctgtaacgtcggtcagggtgaccctggccgtattgggatgggccccgtcgatttcgcctgtggtaatgcttacttccagaccctgttcccgtgctaactccggcgccctgcgtatacggctgtcgtctgtggccatgcccatgataccggcaatcagggccttgtccgtgccgtggcccttataggtctttgcaaaagagccgtgaaggaaaatgtctgccttcacggccggcgctcccaacagagccagggttatcctgccgattctggcagcccctgccgtgtgggaactggaagggcctatcatcaccggccccaggatatcaaatacattcatgatattccgcctttctgttattctttatcagtattatttgtcaggctatgataagctttgccccggcgccccggatccggctttccatctgaggggagatgccggagtctgtcacgatggtatctacctcctcaaagggacaaattttgagcaggctggcctttccgaacttggtggagtcagccaggacaatggtacgggtggcagaacggtgcatctggttctgtatccgtatctcgctcagcctctggtccgtacatccgatgacagggtcaatgcctgtcacggtcatgaacatgatgtcgatatgaatgctttccagcgtggaggagaattcattgaccagggtatactcatcccggttcagaataccgcctgtgagaatgatggtaatgccgggattctcagccagcatcagggcgttctggatggagttggtcacaacggtaaggttgcggaaccgttcctttaatacaagcgccatcatctggctggtgcttccgtaatccagggcaatcacctgtccttcgcttaccaggccggctgcctttgatgtgatggcagctttttgctccaggttctgggagttgcggatctgaagggaaatgtatccccccggaatatccgctggttttccggaatccgcagggacagcccctccgtgtaccctggacaggcgtccctggctgtccagatactccaggtccttgcggatggtttctgaggaaacgcccatcagctttaccagttcggctgtatgtacaattccgtctttatctaaaagctccagaatctttgtatatcgctgttttgccagcatatgttttagccctcccttctgatgcttttcttaacataagtcattcacaatttattatatcccaaaatcccaaaatggaaaagtgaaaagtgcaataattcccaagctaatcccaataacgcttcactgcggcggagaaaaaagattgcgaaaaacttgggtttaatacgaccgatttcattataaccaacatattcgcaattttatagatgcgaaatgcacaaaaagccaacaaataatttggtataattgcgaaaaaatttgatattattgcgaattagcttgaaaacccaaccaaaagcagatatactaagtctgtagcaagatggaaatgtcttgcagggaatgagaggtaccgtttatggagtgggtaccagatacacacaacgaaaggagatttaatagatatgaataatgaaacaagagcgaaaatcgtaaaagcagcacccaaccgctggctggtgttctgtatcctcacattatcaggaggtattgcattcaagctttcgtccatgaaggacatgttctatgtacccatgcagcagtttatgggactcaccaatacccaaatcggcggcgccctaagtgcttacggcatcgtgcagaccatcggcctcattgcaggtatttacatctgcgatatgttcagtaagaaatatatgattggcggctccctgattggacttggaatcgtgggtgtatatctttccaccttccccggatactggggatttttggcagccttcggcgtaatggctattttgggtgaggttacatactggcccgtactgttaaaggccatccgtcttctgggagatgagaaaacacagggacgtatgttcgggttcctggaaatgggacgcggcgttgtggacgtcatcatcgcatcctctgcactggccatcttcaaggccatgggagaaggtgcagcggcgctgaggggcggtctcttattcttatcagcagttacggcagcagccggcgttctctgtctgatttttgttcccaatgatgaaaaacgcgtggacgaaaccggcaaggaagtcaataaggcacaggcagcctttggcggtatgatgcaggctatcaagagtgttgatatttgggctgtttctttgaatggttttacggtatactgtatttattgcggacttacatattttattcctttcctgaaccagatttacttccttccggcaacagccgtaggtatgtacggaatcatcaaccagtacggccttaagatggtaggcggaccaatcggcggctttatgtccgataaggtgcacaaatcctctgcaaagcatatccgcgcaggctttgtggtatgtatcatcgccatggctcttttcctgatggtgcctcatgagtccctgggacagggcggcaactggataattggcgcggcgtgcacactggctttcggagccattgtatttaccatgagagccgtgttctttgctccaatggatgaagtcagggttccaaaggagattacgggagcagctatgagccttgcatccctggtcatctaccttcccaatgcatttgcatatgtaatgtacggaagtttccttgacaggtatccgggcatggcaggattcaggattgtattcagcgtcatgattggatgggcggttatcggcgtgggcgtgtctacattcctgattcaccgcatcaagaagtgccaggcagcagctaaggcagagtaggtctgcggactgattttgacagaaggacggtatgaatatatgaaggaatatcatggttttaaaaattgcggaaactggtataagggcaatatccacagtcataccacggtgtcggacggcatgctcaccccggagcagtctgttaagctttacaaggacaacggatatcatttcctgtgtttttcggagcatgacatatttacagactatcgggagcagttcaacacagaacaatttatcatagtgccggccgtggagagcagtgtggtgctgtaccgggcaaagggcacaagcgagcgctataagatacatcacctccacggaatactgggaacgcaggccatgcaggatgcggcccctctggggacctacggacacatgcagttcattccccctatgaaatttttcggggagtggaccggccctgaggctgcccagaaagtggctgacatgctgagggaccacggctgtgtgaccacctataatcatcccatctggagccgcgtgacagaagaggagtttatccacacagagggcatcagctccctggagatatttaacttcaatacagtgcaggaatccaataccggctacgatgtgacatactgggacaggatgctgcgcatgggaaagaaaatcaatgcatttgccagcgacgacaaccacaatgaagggctgtttgaggattcctgcggcggctggatctgcgtgcagtctcctgaattaagccatgacggcattgtacagaattttattgacggtaattattattcatcatccggccctgagatatatgactggggcgtacgggacggcaaggtatggattgacacatccaatgtgaatcatgtaaactttgtatgcggaaatatcatcaatgacgggaccacggttctgggtgagcggtttaaggatactctgaaccatgcggaatatgccttgaagggccatgagacctatatacgtgtggaggcagtggacaaatacggccgcaccgcatggacaaatcccatttatttggaatggtaatcaggtactaaaggaggaatggaagaatgaaagagcttcagcagattcttacgacctttgacgactggctgtggggcaactggctgttgtttgtgcttcttggagtgggtcttttgtatacaatcataacaggaggcatacagatacggcgttttggatacatcataagaaagacaatctgggagcccattctctcaaaaagcaaggaatccaaagaagcaggaaccatttcttccttccaggccttgtgtacggcagtggcatcctgtgtgggaagcggcaatattgtgggcgtgtccacagccgtgctggcaggcggtatgggagctatcttctggatgtgggtggctgcctttgtgggaatggctaccaaatacggcgagatcatactgggtatgctgtaccgtgaaaagaatgaagagggaaattacgtgggcggtcccatgtactatatcaaaaagggactgcatgcgccctggctggctgtgctgtgcgccttcttcatggtaacccagattatcggaggcaacttcatccagtccaacaccataagcggcgtcatgaaggagaattttggcgttccctatctcacaacaggaatcgcccttgtacttatcatctttgtgattaccctgggcgggcttaaacgtctggcccatgtggcccagaggctggttcccaccatggcgcttatctatgtggtgggcgggcttctcatcatcctggccaacatcaccaaggtaccaggcgtgttcgcggacatatttgccggagccttcggcctcagggccatggctggcggcgccatgggatccatgctgattgccatgcagaagggtgttgcaagagggctgtactccaatgaagcaggcgagggatccgcgccggttatccactctgcggcccaggtaaaccatccggtggaacagggcataacaggtgtggctgaggtattcttagacacctttgtcatctgtaccatcacaggtcttgtgctgggagtcaccggagtgctggattcaggcgcaccgggaaacgtactggccatcaatgcctttgccagcgtgtgggaacccctgcgctatgtggtggctgtctgtctcctgatgttctcgtccaccactctgatgagccagtggtacttcgggtttgtgggtctgaactacatattcggcacaaaggtggccgataaattcaaatacgtgttcccatgcttctgcatcatcggagcattggcggagatcgaactggtgtgggtcatccaggatgtagccctgggacttctcaccataccaaacctaatcgccatggtggcgctggccccgcaggtgaggaaggctaccaaggagtattttgggagagaggcaggcggacgtggataggcgtccgcgttcccgcctctcacccactgcatatcagggcgtccgctgtcctttctccgcacaggtaagaaaaagtctctgcctgaagatatggaaaatgggatagggagggcctgctaaaattaacttataacagcattcaggcaaggcgcggtattgctttggatgcgtctttttatgggtatgccagtagtcccggcatgccatttttcttttttccggattggttataaacggtgcagacgcagagaaacgcagcgggtgagaggaaggggaggaccccctaagcgtccgccccttaacaaccaaatccccctattgacaatctttccccataaagctacaatcatatcaacagatggaccaactagtatatgtaaaataaagtaaggtacgccgtcagggagaaagagaggacataagtatgatatcagagaaaatgaaaccattggtcaataacaattccgccatccgcgccatgtttgaggagggtaagcgtctggccgccatccacggtgcggagaatgtgtatgatttcagtctgggcaaccccaatgtgccggctccggcggaggtgaaccaggcagtctgtgatatcctgaaggaagaagagtccacctatgtccatggttatatgagcaacgcaggctatgaggatgtaaggcaggccgtggctgaatccttaaataagcgcttcggcacgcagcttcaccagaataacattctgatgacagtgggggctgccagcggcctgaatgtgattttaaagacattgctgaacccgggggatgaggtaattgcatttgctccctattttgtggagtacggcaactatgtccgtaattacgacggaaatctggtggtcatttcaccggacacaacggattttgagcctaatctggcagagtttgagcagaagattaatgaaaagaccaaggcggttatcatcaatacccccaataaccctaccggagtggtatactccctggaaacccttacaaaaatggctgacatcatgagggctaaagaaaaggaactggggacaaccattgtgctgctgtcagacgaaccttacagggaactggcttatgacggcgtggatgtgccctatgtgacgaatgtttatgacaacaccgttatctgctactcttacagcaagtctttgtccctgccgggagagcggattggctatcttgtgattcccgatgcattaaaggacagcggtgaagtgttcaatgcagcgaccattgcgaaccgtgtgctgggctgtgtcaatgctccgtccctgatgcagagagtcatcctgcgctgcctggatgccaaggtaaatctggaggcatatgacagaaacaggaacctgctttacaacggccttaaggatctgggttttgagtgtatcaagccccagggagcattttatcttttcgtaaagtcaccggaggccgatgaaaagaaattctgtgagaactgcaagaaatacaatatcctggtggttccgggaacctcctttgcatgccctggctatgtgcggatatcttactgcgtgtcctatgagcagattgaacgttcccttcctgccttcgcaaaggtggcggctgactacggccttacaaaataagcagccgcgccgggcggaatacagcaggtaagaaggaaaaattctggaggagagcagacatgagaccatgggaaatgaatatacgccgtgtagtcccctatgtaccgggggaccagccggcaggcgataagctgattaaactgaataccaacgaaaacccctatccgcctgcgccgggcgtggaacgggccttaagggaaatggacgcggaccgtctgcgcaagtatccagacccgtcttccgcagagcttgtaacggctctggcagaatattacggggtgggggaggaccaggtgtttgtgggcgttggttctgacgatgttatagccatgtccttcctgaccttttttaactcccaaaggccggtgctgtttccggacatcacctattccttttacaaggtttgggcagatctgtaccggattccctatgagacgccggcactggacggaaatatggctatccggtctctggattataaaagggaaaatgggggaattatattcccaaaccccaatgcgcccacaggcctctatatgcccctggaccaggtagaggaaattgtaaaggccaaccaggatgttattgtaatcgtggatgaggcatacattgactttgcaggcccctccgccagggagctgctgcccgggtatgacaacctgctggtggtccagaccttcagcaagtcccgttccatggcaggtgtgcgcattggctttgcgctgggaagccctgcactgattaaagccctgaatgatgttaaatattcttataattcctatacaatgaacctgccgtcccagatcgcgggcacccaggccgtgaaggacagggcgtattttgaggagaccagggcgaaaatcatgaccaccagggagcgctccaagaaacggtttgcagaacttgggtttacattcccggattccatgacgaattttattctggtgacccatgagcgcgttccggccagggccatattcgacgcgctgaagaaagagcagatttatgtgcgctatttcaatgcgcccaggcttgacaacagccttcgggtcagcattggcacggatgaggagatggatgttttgttccggttcctggaagagtatctgaaagagtggaagccggccggggattctgagtaaggacagtagggaggggccggacagccgggtgccggtaagatgaatcgcggtcagacgtatgggaaatgaatcagacgtatgggaaatgaatcagacgcgcgggaaatgaatcagacgtatgggaaatgaaaaggagaacggatccggggtaaaggaaagggaaaatgctccggagaacggaaaaagcagtcaggagagatggatatgatggaagaaacaggctggaagcattatcttcgccttatacttaatattgtaatcccattgacgggctggctgttaatctgcctgctgggacctaagcttttgaaatttttcatgccctttgtcatcggctgggtgattgcaatgattgctaatcccctggtgcgctttctggagcggcgggtgaagctggtgcgcaggcacagctccattgtcattgtggcggcagccctggcccttgttatcggactcttatatctgctggtgtcaaggacctttgtcctgctgcgccagttcatcatagacctgcccggcctctatgccggcattgagggagatgtggcccgcagcatggagcagctggagcatttgtttgattttatgcccgacagcatacagcagagctgggcccagtttggaaacaatctgggaagctatatgggaactgttgtggagaagattgcatctccgactgtggaggcggcgggaaccgtggccaaaagccttccggccatgctggtctacaccgtggtcactatcctgtccgcctatttctttattgtggacagggaccggattctggcagccataaaagcccatatgccccaatgggcgggccgttacgggctgtatctgaagggggaggtgcgccatctcataggcggttatttcatggcccagtttaagattatggcagtggtgtggcttattcttacggtggggtttatcgtgctgggcgtgggttacggtccgctgtgggcgtttctcatcgcctttctggattttctgccggtctttggaacgggtacagcccttcttccatgggggcttattaagcttttggggggcgagtacgcttttgcggccggcctgctgctgatttatgtactgacccaggtgacaaggcagattgtgcagccaaagctggtgggagacagtatgggcctgccgccgcttctcacgctgtttttgctgtatctgggatttaaggcggacgggattgcgggaatgattctggccgtacccattggtctgctgtttgtgaatctgtatcattacggagcgtttaaagacattacggacagtttgtctgtccttgtgagggatatagaccggttccgccgtaaagaggaataaggtccctgccattgaggcaaaaggaataaaatcgaatcaggagaagacggagttgaaagtagagaataatctggatacagataaagtcagagggctggtgtggaggctggcatttccttccatgctggctcaatttgtgaatgtgatgtacagcatcgtggaccgtatgtacattgggaatattccggagattggcgccctggccctggccggcgtgggaatatgcggtcccgtggtcacccttatatcatcgtttgccagctggattggagtgggaggggcgcctcttatgagtatccgtctgggacagaaaaatgagagggccgccgcccagatggtggccaactgctttgcccttctgacaggaatggcccttattatcatgatagtgtcctatctgtttaaggatcagctcctggtgttctttggcgcgggcccggccatatttccctatgccaaccagtatatgagctggtatctgacaggtactgcctttgctttgatttcagccggcatgaaccagtttatcatatgccagggatttgccacggtgggcatgaaatcagtggtgctgggggctgtcagcaatattgtgctggatccggtgttcatttttgttatgaatatgggagtcaggggtgctgccattgcaaccgtgctgtcacagatggcgtcctgcatctacgtgctgctgtttctgttcgggaaacgtcctctggtgcggattacctttggcggttacaggtggaagaccatgaaacaggtgcttttggtgggcttgtccccctttttaatcattgcctcggacagcctgctcattattgttatgaacatggttataagcagctatggcggacctgagagaagcgatatgcttcttacctgcaataccattgtacagagctttatgctgattatcactatgccgctgggaggaattaccggtggaacacagaccgtcatggggtataattatggtgcgggccgtcctgacaggatacggaaggcggaaaaacatatactgcttttatcagttgcctttacaactgtcatgttcataattgcccaggcaggaccggggtattttgtcaggatatttacaagggaaatgtcctatgtacgggttacggagtgggcaatccgcatatttaccctgtgtattatcccactggctgtggaatatacggtggtggacggatttacaggcatgggtatcgcaaaggtggctatcagcctgtccatgttcagaaaatcggtctatttcctgggaatgattctgctgccccgttatttcggggtggaggctgtgttctatgccgagcctatttcggatattatggcctgcgcggctgcgtccacaacatttattatgttgagcggaaaggtgctgaaggacaatcgcaggctgttctgatggggcggtttgcggacagtcggacagaaacatacataaatggaaggaagaggaatatgaatatactggtaagcgcctgtttgctgggtgtggaatgcagatatgacggccgcggcgtgcttatgtcccaggcagaggaacttctaagcagacatcacctgattccggtatgcccggaaatcatgggcggtctggccacccccaggacaccggcggaacgaacgggttcgggagtcgttacaagggatggcgaggatgtcacggcagcgtatgaaaaaggagccggggaagtgcttaagctggcacagctttacggctgccaggcagccatactaaaggagagaagcccttcctgcggaagcgggcaggtctatgacggcacatttaccggcacccttacaaaaggggacggtgtctgtgccgcatgtctgaaggaacacgggattagagtatatggggagagccaggtggggagactgttggaagacatagaaaggtaaaggtgcatgagggaagaaagaaacaaggcagaatccgtaccagcccggagcgaggaaaggcgtccccgccgaagccgcagcagggaggctttcagacagcgtcagaaggagctggcagaaagcagggggcaggagaagcgggtacaggagaatggggggcaggagaagcgggtacaggagaagcgggtacaggagaagcgggtacaggagaatcgggtacaggacaccccggggacgggcgaagacaaaacgcacggaggccagccggaaaatgacggccagggaacgtttaatacacagggaaaaggtccttttgataaattcctgagctggaaaaccgctgttctggttctgattctggccgtcgctgttctggctggaatctatgcatacaaagccctgggttaccggaatacatatttcccccatacagttattaatgggatggacgtatcagggaaaaccgtaggggaggtaaaggaactcatagcttccggcgtaaacgggtacgggcttgtacttaagctgcgggacgaggagcaggagacaatcaccggtgaaaaaatcggtcttcatacggtgtttgacggaagcctggaggaaatcattcgccagcagaatcctttccgctggcccagatatctgcttaagggaccatcttacgatataaagaccatgattgcctatgatgctgatgctctggctcagacccttggcggtctgtcctgctttgacagcagccgggccgtcctgccctcagacgcttacctgtcagactatgtgagcggccagggatattccattgtgcctgagacagagggcaccacacttgacatggataaggtcagggcccaggtggatgaggctatatccagccttgccccggaattggacctggacgccctgggatgttataagtctccgtccatccgcaggggcaatacctctctggcagcggccagggatgccaggaaccgctatgtgaatatgactgtgacctataccttcggcagcaagacggaggtgctggacggggatgagatacatgagtggcttgtgtctgacggggaacaggtttccattgacccggaccaggccgcagcctacgtaaagagcctggcctccaaatataatacggcatacaggaagcgctcttttgccaccagctacggtcagaatgtggaggtatccggtttttacggctggaggatcaatcagtcagaggagacaagagagcttctgggcattctggaggcaggagagagtgtctccagggaacctgtatatttgcagacagcagcaagccatgacgggccggattacggcagtacatatgcagaggttaatctgacggcccagcacctgattttttacaaggacgggcagaaggtgctggaatctgattttgtgtccggcaatgtttccagggggcatactacgccgccgggaattttttctattacatacaagcagagagacgcggtgctgaagggggagggatatgccagcccggtgaagttctggatgccttttaacggaggaattggttttcacgatgccagctggcggtccagcttcggcggttccatctataaaaacggagggtcccatggctgcgtaaatatgccctatgacaaggcaaaagagctatttgaaaatgtatatgcgggcatgcctgttatctgttatgaccttccgggaacagagagcaagaaatccagccagtcctccggcagggcgccccgggagacaacggcacctgcgcagccggcgcctgtacccacacaggccccaccggcggtcccaccgtccgttttgccggagactgtgccgtcagaaacactgccgtcagaggcagcgccgcctgaaacatcaccgcagccgtcacagccccaggtaatcatacagcccgcggaccagactacggcagcgcctgcccagacacagccgtcccccaataccgaagaagggtatggtccggccttccagacaccccagtccggctcagcagccgggccgggcgtcagctgacggaacctgcccaggaggggctgaaccacaaggaattttgcagaaggctgtggatttttcaagtgaatttattgacaaatggaaaaaaccattttataatgcctttaatgcatctagggattactcgtaaagccattattcaaaactagggaggatatggactatggtagaaaagaaagatgttaaggcaactgtaaaggcagcagcggaggcagctaagcctgcagaggctaagacagaagcaaaaccagcagctccggaaaaagtagaagcaaaggcagaggcggcagttccggtgaaggcagaagcagctcctgttgagaaggaagcaaaggcagctccggctaaaaagacaacagccaggaaaacagcggctaagacaacatccaagaaggagacagctccaaaggaagcagctaagaaggaggcagctccaaaggcggaagcgaagaaagaggcagctaccaaagcagcagctaagaaagaaaccgcgaagaaggcacctgccaagaaggcagcagagccaaaggcagccgtacatttccagtttgacggcaaggaccttgtggcaaaggatgtgctggacagggctgtgaaggcatttaagaaatcacacagaggcgttgagattaagaccattgatctgtacattgtcgcaaacgaaggcgcagcctactatgtggtgaacggtgaaggcggagatgattacaagataatactgtaattcagaataaaggattgaaggatgaagtgggttgctgtatcatggatgcagcagctcatttactttatgcgcagcggacaggcatcatgtcaataaggacataaaatcaataaagatataatatcaataaggataggaaaaaggacagtatggcagatttaccggtacgatttgaagagcggatgaaagcattattaggagaagaatatccggcttttgcggccagctatgataaggagagggtccagggattacggtttaacagcctcaaattcccggacaggatacggatacaggatgccgttggaagcggggaaaacagggaagcggggaaaaacggagagggcaaagaaatctgtgaggccaaggcggtctgtgaggccaaggcagactgtgaggcaaaagcagactgtgaggtcgaagtaacctgggaagaggccggtgccgccgaggcagccaaacagatcgggcaggagaccggatttacacttgagcggattccgtgggtgaaggaagggtattattattccggcagcagaccaggtaagcatccctatcatgaggcggggctttactatatccaggagccaagcgccatggccgtggtggaattattagaccccaggccgggagagcgtgtgctggatttgtgcgcagcgccgggaggaaaatccagccacatcgccagcaggatgaagggaagcggctttctcctgtccaatgagattcatccggccagggcaagaatcctttcccagaacatggagcggatgggggtgcgaaacgcagtggtgtccaacgaggatgcccaaagcctggcagggacatttgaccatttttttcataagattgtggtggacgcaccctgttcaggagaagggatgttccgcaaggatgaggacgccagaagccagtggagtgaggagcatgtgaagatgtgcgccgcccgtcagggcgagatactggatcacgcggcgtctatgctggcgcccggaggcagaatggtatattccacctgtacctttgccccggaggagaatgagggtacggttctggccttcctgagacgccatccggaattttgtacggaacaggtgcctgcctattctggttttacgaaaggaaagcctcagtgggccgggccggaggcggaaggctggggcctggagcggacctttcgcattatgccccacatcctggagggagaaggccatttcatggctgtcttaagaaaagaaggagagccggaaactgcggtaaaagccggaaaccgggaccagctgtatctggacggcagaaagagaaaagaagtgttcagggattatgaaccctttatccgggacaccctgtcagaaccggatacctttctggaaaggaaggaatacgtgctgttcggggaccagctgtatctgatgccggccgatatgccggatatgaaggggcttaagattctccggccgggtcttcatatgggcacccttaaaaagaaccgttttgagccatcccatgccctggcactggcgctcaggaaagaggaggcgcagtgcttctgggaactgtccccctccggagacagcataatccggtacctgaaaggagaagctctcagcgaggacgcaggaacacctgagggatgcctgaaaggctgggtgctggtatgtaccggcggtttcagcctgggctgggccaagtatgcgaagggcatactcaaaaaccattatcccaagggtctgcggtggaattaaaaacagtcagatgccggacggcagaagctgtttcatatcttcaggcagcccggccgtgaattccatctcctttcctgtaatgggatgctcaaacctgagaagataggagtggagcggctggcggtcgatataccggtaatccggacagtataagaagtctccgggaagcggatgccctatagacctcatgtggacccgtatctgatgtgtcctgcctgtttccaggctgagactcaccagagacaggtccttttcttcattgtagagcagagtacggaaatgggtgactgccctttctcctgtttcatggtccacccggcgctcgatggtggagccctcagccctggcaatggggctgtcaaccgtgccttcctcaggtgtatgtccaagtacaatggccctgtattccctcctgattctgcgcccggtcatttgttccgataagatacaggcgctgagcatatgcctggccaggaccagcagaccggtggtatccctgtccaaccggttaatgacccggtaagtaaaagcctcccccttttcatggaaataccaggagacggcgttggccagggtattgtcatagtggccctgggaggggtggatgggcacgcctgcatccttattgattaccagtatatcctcgtcctcatatacaatagaaagaggaagctttaccggtacaatattcccggaatcctcctcctcaggcagggttacctccactgtctgcccggtcttaagccggtaacctgcgtatgccgcaattccgtccactgcaagtccctgcgcggccttaatgcgcactgccagccggtgtgaaaatccctttgcctttaaaaactgacctaggacaattccgtcctccatgtctccaatggtataacatatagcgctccgtctcatgtctgttcctcaactctgttttctgtatagaatcctgttaactgtctggataaggtgttaattcaaatgttttttcttgctggcagcgtggtccacgatggcgtccttacgcaggaagctggcccgttttacgctgtcgattccgtatttgctgcggatggcatccactgccttttcaaaatcctttttcttctgaagtccggggtcgtcaaaaaggctcatctgtgagaaaccgtcatcagatatcttaccggcccgcacacccatgagccgcaggggtgtcatattccaggattccctcagcaggcggcaggaatactcataaatcacggaggtggaatccgttggttcgggtatgaccatctggtgagactggttcctgaactcccagtcacgcagctccacacagacattattgcacagcacatggtccgccctcagcctggcgcctacggtttcacagagggagagcaggacctgacaggcgctttcgtagtcagatatatccctggaaagggtgatactgttgccatatgccttatttacaggttccttttcagccacagggtcatcatcaatgccgttggcatactggcggatgaggaccgcatacttttcgcccaggtgggatttgagcacttccaggttgcagcatgccagctgcccgatggtatgtaaccccaggttttccatcttcctctgggcagcgcctcccacaaaaaacagctcccgtataggcaggggccacatcttatcgggcacctcctgaggaaacagggtatggcatttatccggtttctcaaagtcagaggccatcttcgccagaagtttattggtggagattccgatatttacagtaaatcccagttccttccggattcgttcccggatttcattggccacctccatgggactgccaaagaggtggatagtgctggtcatgtccaggaaaatctcgtcgatactgaatttctcatggtccggcgtatattcctccaaaagatccatcatgcggcgggagcatttaatgtaaaaatcaaaccgggacgggacaaccaccagatccgggcacttacgcaaggcctgaaccaggggctcacctgtggtgactccatacttcttggccaaaggagacttggccagcacgattccgtggcgggacttggcgtcccctccaaccgcagaagcaaccattctcaaatccagggcctgcgggtctttagaaagccggtacacacattcccagcttaaaaatgctgaattaacatcaatatgaaaaataagacgctccccatgtcccatgataaaacaccggcctttctgtgttgttgtctgtttacagatatcatagcagaatatgtgttcgggggcaagaggtatatggggagaggaacgcggatgggggaggtattggcgtccgtgggagaaagggaggaggcaggtggggatacggctgcggggcaagtccggtctaaggggctgcgaatcggctaaatacaagagtaagactgcccaaactcgctccgctcaaacagctgtgcagtcttactcttaacgcccattcacaccccctaagaccgactaagcccctgtagatgcatccccacctgcctcctcccttcctcccacccactgcgttttctcatccgctgtctttccccagctgatagattgaggacgctgcccttcacttttccgccccattgctcagattttaccattccatacacctgatattccaagctgacattctcatctgacatttctaactggcttgtttatctggtatgtctaactgtcatgtttatctggcatttcaccgtgcacttcttatcccggcgttggggatatgggcaggtgggagaaaaatacgtagtgggtgggagagcgggggaggggaaggggaatgcatctacaggggtttagaaggacttaggccctgggaatctgcgttaaggggaaagccacacagttgtttgagcgcagcgagtttgggcggcttttcccttgtatttagcagattgccggggtcttagaccttcttaaccccgcagccgtattccccttcccctcccccgctctcccacggacgcgacccctcccccctcgcacaaatc

SEQ ID NO: 3137 - DNA, 87368 bp, Unknown
  gut microbiota DNA sequence
gaacaacaactactaatatcgaaaaagctgcggcgtactgagtacagatgatggaaggagcctgcttcgcatgacgcggagtgggctttttcttgtcctcaccccatagtaatgcctgcatatattggtagtaggacacgaatgacaggcattagcccggacagaacgtgacagaaagggaaggtgagtgggaaatgacgacatttccaatgatatcatacagacagtttgaccaatggatggaacagggaaagattgcgcagctggtggacctgagggagccctggatgtttgagcaggacaggatatggggaagcgtgaacattccctatgatgagcttgagaacctgatgggggaaatccgcaaggacggtaccattgtattttactgtgacaggggggccaagagcatggtggtctgccgggacctgtggaggatgggctatcacgccgtggacctggcgggcggaatgttgaattacagggggaaatacattgacaggaggccgctttcggctttagaatagaaacgtgattattctattttagaggagacagagccatgaaaataatgtttgcatcggatatacacggttctgcatattattgcaggaagatgctggatatatacagtgaatcgggtgccggacggcttgtgattctgggagacatcctgtatcacggcccccgcaatgacctgcccagggaatatgcccccaaggaggtgatcgcgatgctgaatcctcttaaggaccagatttatgcaatcaggggaaactgcgacacggaagtggaccagatggttctggagtttcccataatggctgactatggtctgatggtgttggagggaaaggctttttacgccacacacggacatgtatacaaccaggatcaccttccgccattgcaggacggagatatcctggtacatggtcacacccatatactgaaggccgagaccatcgaggcggaggggggcaggcatattgccgtgttaaacccaggctccgtgtccatccctaagggaggcaaccccagcacctatgccatgctggaggatggggtattctccatacggaccctggagggcgaagtggtcaaggaactgaagctgtaaaaaagagaggctgattgagaggaaaaacgattgaaaacatttgaattaattgccccctgccattttgggctggaggcagtacttaaaaaagaaattctggacctgggatatgagatatccctggtggaggacggccgcgtcacgtttataggagatgacgaggccatttgccgcgccaatgtgtttctgcgcaccgcagagcgggtgcttctcaaggcgggaagctttaaggcggagacctttgaggaattgtttcagggcaccaggaatataccctgggaggactttatacccgaagacggcaagttctgggtggcaaaggcttcttccatcaagagcaagctgttcagcccgtcggatatccagtcgattatgaagaaggccatggtggagcggctgaaaaaccgctatggagtcacctggttccctgaaaatggagccagctatccgctgcgggtgttcctctataaagatatggtgacggtgggcattgacaccagcggggaatccctgcacaaacgcgggtacaggacattgaccagcaaagcgcctatcacagagaccctggcagctgccctgattctcctgacgccgtggaaccgggacaggattctggtggatcctttctgcggaagcggtacatttcccattgaggcggccatgatggctgccaatatggcgccgggcatgaaccgttcctttctggcagaggagtggaggaacgtgatcaaacgcaaatgctggtatgaagccatggatgaggcgggggacctggtggaagaggacgttcaggtggatatccaggggtatgacgtggacggtgacattgtgaaagccgccagaaccaatgcccagtcagccggagtggaccatatgattcactttcagcagcgcccggtcagcgcactgagccaccccaagaaatacggctttatcatatccaatccgccctacggggagagaatcgaggaaaaggagaatcttcccgcattataccgggagataggagagcgctttgcagcgctggatgcctggtccatgtacctcattacttcctatgaagatgcgcagaagtacattgggcggaaggcggacaaaaacaggaagatatacaacggcatgctgaaaacctatttttatcagttcatggggccaaagccacccaggcgcagccaggagaacggttcaaattgagagggcggctatggttgttgtatcagatatagttagaaatggaataaggaaaaaagcagcagccctgtttctggctgtctcattgtctttgggaacagccgggtgcggccaagccaacaatcctgctgagacacaatctccgggcaggattcaggacccggacgggacacaggataccggcggcatacagaacccgggcgggatacaggacagcggcggcatacagaacccgggcgggatacaggacagcggcggcatgcaggaaccgggcggtactagggacagcggcggcatgcaggaaccgggagggacacaggacagcggcggcatacagaacccgggcgggacacaggatagcggcggcatacagaatcccggcgggacacaggacagcggcagcggccggaacccgggcggaaccggaaatccttccggagcaggcggttttgcggcagcaggaggggacacatcagagaacggagagaatgcccagggaagcagcacaggaagcagcacaaccggtgtgtaccagtggaacaggctggatacggccaatataaagcttccttctgcctatgattaccgaaagacaggcagggcgccccagattggaaaccaggggtccctgggaacctgttgggcgtttgcgtccctgacagccctggaatcatccctgcttccgggaaagtccatgacatttgcggtagaccatatgtccatgcacaacagtttcctcctgggacaggacgagggaggggagtataccatgtccatggcctatcttctggcctggcagggaccggtgctggaatcccaggacccatatggggacggagtttcgccggacggccttgcgcccagcgtacatgtacaggagattcaggtccttccctccaaggattacgaggccattaaacgggccgtgtacctgagaggcggggtacagagttccctttatacatccatgagggattaccagagccagtctgtgtactataacagagagaccaactcctattgttacattggaaacgaaaagcccaaccatgattctgtcatcgtgggatgggatgataattactccagggaaaattttaatctggacctggcaggggacggcgcatttatctgtaccaacagctggggagaggattttggtgaccagggatatttttatgtatcctactttgacagcaatatcggtgttcataatattgtatacacaggtgtggagccggtggacaattatgactacattcaccagagtgatttgtgcggatgggtgggtcagattggatacggacaggaggaggcctggtttgccaatgcctacagggcggataagggagagaatctggcagccgcgggtttctatgcaacggacaagaatacggagtacgagctttatttggcccggaatctgcccgatgcagggggcggggaaatggagcgtgccctggataggcggatgttgctggcaaagggcaggctggacaatgccggttattacacgattccgttggataaaaaaatccccttggaggacaacgaaaagtttgctataatagttaaaataataacgcctggcaccgtacatccggtggccattgaatacgacgcaggggacggcattgcccaggtggacttaacagacggcgaagggtatctgagccatgacggaaaggtgtgggaacatgtggaggaaacacagtcctgcaacctgtgcctgaaggcatatacaaagaaataaaagcggtttataaaaggaacagaaggcagaggatttttgatatgggacacagaatcatatttgcaacgggtaatgagggaaagatgcgggagatacgccttatattggctgatttggggcttcccatactttccatgaaggaagcgggcgccgaaccggaaatcgtggagaacggtgccacctttggggagaatgccgagattaaggcaagggctgtgtggaatctgaccggggatattgtgctggcagatgactccggcctggaggtggattatatcggcggggagcccggtatctactctgcccggtatctgggagaagatacgccctatgcagttaagaaccggagtatcatagagcgtcttaaggaggccgggggccaggagcgcagcgccaggtttgtgtgcaacatcgcggccatgctgccggacggccaggtactccacacagaggctgtgatggaggggcttatcgccggtgagccggctggggagggcggtttcgggtatgatcccattctctatctgcctgagttcggcaagacatccgctgaaatcaccatggaccagaagaatgaaatcagccacagggggaaggcattaagggccatgaaggaagccctggaaggtgtgcttaagtaagagatggagaggacgaaggatgaggatattaattgtcagtgacacccacagaagggatgaaaatctaaaagaggtaatccggcgtaccggaccgcttgatatgctgattcatttgggagacgcagagggaagtgaacatgccattgccacctgggtcaatgaagactgcgatttagagataattttgggaaacaatgactttttctcatgcctggataaagagaaggaactgatgattggaaggtataggacccttctgacccacggacattactataatgtctctgtgggagctgagtacctgaagcaggaggccagagccagaggtttcgatatcgttatgttcgggcatacccacaggcccttctatgaggtggagaaaaaagaaggggataaggatttgattgtgctgaatccgggaagcctgtcctatccccgccaggacggacataagccctctttcatgctcatggagattgacaaagagggggaggctcatttttcgctgaattttctgtagaatttttgttgacatttgggaaggcatagtatataataatccttgcgtcgagagacgggattggatgacaggttatattatgccggcgccggggtgtggctcagcttggctagagcgcctggtttgggaccaggaggtcgcaggttcgaatcctgtcaccccgattataattaaatagattgatttcatgcaggtgtagttcaatggtagaacactagccttccaagctagatacgtgggttcgattcccatcacctgctctatttttttgtccgggaagccttttgtatcagggcttccttttttcgtgccgccaccttgtgcacattctattatacacggttccatttcccactgaactgataccatccgggttatcccgcccgccatcccggccatcccggccatcccggctatcccggttcacccgcccggccatcccggctcacccgcccggccatcccggctcacccgcccggccatcccggctcaccatcccggctattccgcccggccatctcagccattccgcccatcctgcccgccccgcccggttccgggctgattttcccccaccttatattacaaaggctgtcgtggtacaataggcagatattcaccggaacatgagatacaggcacgtcattatgttcaaatgtatgtacagttttgtccacatggttccggtcaaattaaggaaaccgtaaaactaacaatcctcagctgcacttgctataatcaagctatcaaaaggcacctgggaggtatggagaggataagacgtgaattcaagacagattgcatttctgagacttttgctggaacatgaagagtatctgcccgtgggcttctacgcagggagaatggatgtatcggacaagacgctgcgcagaatgattcacggagttaatgagattctggcgtcctataacggagtcattgagagccggcccggaaccggaatcaggcttgaaatcaatgaggaggagcgggaaaggctgatgaattcagcttatatgatggaacttatggattccggcgcattatccaggtcctggaaccaattgtccagaagaatggatatcgccctgaaccttctgctctattcggatgaggccacctcgctgtccggacttgcctacaaatattatgtaagcaagagcagcatagccggggatctgaaagcccttgtgccttttgccggaaagcatgaattgagaatcatccagggacatggggggacatcggtagagggaacagagagctgtctgcgcaaggccctggcggaactgctgctgtatattctggacaataatataaatgccaataccagaggcaatccggccgccacaggcatgtttgagtcggaaacgctgatgacgattctggatatctttacggaggaagacctgaattttgtggaaggactcataaaacacattgagacgtctgccggttacaggtttgacgagcgggaatacatggaattttccgtgaacctgctagtgatgatttacagggtgagaaatgggtttctcatggagccggtcttaaaaagcaattaccggaaacaggagagggatcccctggatgccattgcgtttgagctggcctcccgtctgagcggttcttaccggtatacgctgtctgtatccgaaacttcacatatttataatgttctggccgccacccatcttgggaatttcctgatgcagaaggaactgccggaggaagaatccaggaaaacggcagtggccttcggtgaagattttattgatgcgttttctgtgattacaggaatcaatctgagaacaaaatcaacattttatgtgaacgtgatatcccatattacgctgatgctgaaccgggctgcatccagcaccccggccaggaatccaatcatagacatactgcttgaaaattataagggtaccatcaatgtatgtcagattatatgcagaatactgacggaaaagttcaggctgccggagataagttttgatgagatttgttatctgatgctgtacattcagggcgagctgctggctgatgaggagaaaatggatgtgatactggtttccaacatgtcaaacagcatcaccaatatcctgaagcataaattatcccagaattatcctcaatggactgtggtgagcagtgactacaaccattttctggaaatgtcccaaaaacaatatgatttgattttatctacggtgcccctggggagcagggaacatgtgataccctatgcgcttatctcgcctctgctggatgagaaggactgctcggccatcaacaatctgctgaaatcatgccgtcacagggaggatttgtatttgcgggaacttatgagagccaggaatgacctgtacgatatcggatgtgccgtagaagtgcggaaccggaagccgatggagattcctgtgacaggatttttaaaggtcactgcattaaaggaagtggagtttgtctatgtccataatgaggcgggcattaaccgctgccagtttgtgacggatttgctgcaaaagaagctgcataaagtgattatggatatgtccaattgggattttatgctttttgcgtcgaaaatggtctatctcatggacaattgcccggattgggccatgacggaattcatacagaatatcattacggaggggagataatatgtataaaatcattgttttcacacacggttcactggccgaaagcctggtaaggacatcgcggctcatcctgggcaaccagcctgatatcgagacttactgtgtggagccggggtgcaatctggaggagatgagaaacggagtggagcaatccatccggcgctccaatgattcaggccaggaagtcctggtgcttacggatctgatgtacggaacgccgtttaacaccatgattcagctggaggaggaatgttcctttacacacatcacgggtaccaacctccctttgctgatagaggccatcaaccgccgtctgctggacggaaacagcagaagttttgcaggactggtggacacggccaaggaagggattgtagacagccacgttctgctgcagatgagctgacaagcacgggctgatacagacaagcgctggctgatagtgataagcgcagactgatacagataggaaaggagcaaaagcatatgaaaaacattgttttgacaagaattgacgacaggctgattcatggccaggtagtgactgcctggattaagcagtatccaatcaataagatactcattattgatgacgagctttcccagaaccggctgatggagcgcatctacaaggcagcggctcccatgggggtggaggtgctgatacagtcggtatccgaagcccgggagttcctgaaggaggagccggtgaagggagagaattttctgatacttgtgaaggttccggaaatcatagagtcacttctcaaagaggggattgaaataaagaaggtgattctgggcggcatgggggccaagaacggccggaagacctttaacaggaatgtgtcggcaagcggtgaggaggttgaatgctttaaacggattgtggaagggggagtggaaatcttttatcagctggttccgaatgataaggccgttaacatcagaagcctgttttagtgaagcaggccagaatttgatttggaggaggtagcatatgagtatcttaacagccacattattgtcattgttatacttttggggaaatagtgcatttgttctgggtgtaaactggtggaccgtcatgaggccccttgtttccggcttcctggccggcgttatcctgggagaccctgtaaagggcgccatggtgggagcccagattaacattctttatctgggattcatcggagccggcggagcccttccaggtgatatctgtctggccggcgtggtgggcaccaccattgccattacgggcaatcttcctgtggagacagccatggctctggcagttcctgtgggactgctgggaaccatcatatgggtggtgaagatgacggtcaatacggcctgggtccgggtagcggaaaaaatgtcggcaaagggggacaccaggtactattggatacccaatatcgtgctgccccagctgctgctgtttctgatgtcctttataccctgtttcctgatggtatattttgggacagattatcttaagtctgccatccagtttttgggagaaaacatagtgggcgtccttaccaccatcggcggcatgcttcccgcagtaggtattgccctgaccttaaaatccatatttaagggcgagtccgtggtattctttttcttcgggttccttctggtccagtattttgggctggatatgatatctctgggattttcagctgttgtattcaccctgatttatatgcagttaaaaggccataagctgagcgccatgggcggcagcctgtttggggcagagggaaataatgagaacaagtatgtacttttggacaagaagacaatacgcaaatcctggctccggtggattatgttcaatcaggctaactataattatgagaggatgcagggaaccggtttctgtcacgccatggtgcctgtcatcaataaactctacccggataaccaaggaaagcgcgcggaactgatgcagaaccatatgcagttctttaacacggagcctcagtggggggcctgtatcattggcctgaccgctgctctggaggaaaagagggcccagggctctgaggagattacaggggataccatcacatccattaaatccggtcttatgggaccgctggcaggcatcggagataccattgacggaggcgtggtgacgccgttgctccttacattattcatcggcattaccaatacaggcaacatcatgggggttattggctacattatagtggaagccctgtttatgtggaccatatactggcagtcctacaagctgggatatgaaaagggcagcgatgccattgtaaccattatggaaagcggcctgatcaaccagctcatactgggcgcatccattatggggtgcctggtgcttggcggactggtaggcaattatgtgaccctgggattaaaacttatggtccctgtgggtggaggcgtcatgttcaatatccaggaacagctgtttgacgtgattctcccgggagcgcttccgctgctgctgacccttggcacatacaaattggtaaagaagggctggtcgtctgtcaatattatcatcctggttgcggtggttggtctggcaggcggacttttaggaatctttgcataatcgttaggaggaaatatgacacaggaatacaaatctttttcgccggaagaattccggctccacaatgaaaagcttcaggctgagatggaaaagcaggacatagacatgcttatgctctccactcctgaaaatatatattattccactggctaccgctcctggtatacatccagccttttcaggccggtatatgtgctggtgcccaggaagggggatccggctattatactgagaatactggagaagaccacggtacagtataccagctggaccagccgcatctactgctggggaactgccagcagaaacctggggcctctggagggggaggagccgatcagcatcattgacagaatcataaaggaaatccagccggatacagggaccattggcctggaggcaggagacggcatgcagtacttctggtccatggagctgctgaagaaaatcatggattcccagccggacatccgtttcacggatggatccctggctatacagagagccaggatggtgaaaacgccatgggaaattgaacgaatccgccatgtgtgccggataacggaacaagcaatattggaaacaggaaagactattgtggcgggagagacaacggagaaggacatatccaagggcattgccatgcgcatggcccggggcggagtggataaaatatcgtatctgaccgttaccagtggtattgacaagtactgcacattcaatacatatgccacagaccgtgtggttcagaaaggtgagtatgttctggtggatatcagcggccacattgacgggtatgcgtccgaccttacccgggtgttctatctgggaaccgtgccacgggaggaacgggaaatggcaatgacggccagcggctgtgtggcggcggcaaaggaggccatgaagccgggggtttccatcgctgagatcaaccgcatctgcgagggatacatccgggattccagatttgggaaatttctgcttcactccagcggacactgcatcggcctcaacgtggtggagtatcccactatacacgatgaagccaatgaaaaactgaagccaggcatggtgtttgccgtggaaaacggagtgtatccctatgacctggaaaagggagtggagtccatttatctgtcctttcggatggaggatgaggtgctggtgacagaggacggcgcggaatggataaccggtccgggagagcctgtgattgaagtgggggcaaaccactgacaggtgacatggaaatatgacataaaatgcagaatataaaatacagaatataaaatacagggcgccggacaatcttactgtccggcgtcctgttggtttaatgcccccggaatttgtttcatgcagaaggttatctgttttcccttctgacccggcagggatttccgtatgcaacggtattgctgggaatatcttttgtaaccacactccctgccccgatcaccacgttgtcgccaatggtgacacccggcataataatggcgcctccgccaatccaaacattgtccccaatcacaacaggagctgtctgtgtcctgcagaacgcaaaggaaccgtcctgctgcggtactccaaaccggtccattgcatttgtgggatgaaaggccgtatatatctgcacattaggggcaatgagcgcattgttcccgatacgtatcacattatcatctaaaaatgtgcagttcatattgacttcacagttgtttccaaaataaatattgttgccgtagtccgcaaagaacggcgcggtgatccaaagggcttccccccttccgcctaacagctcatttaagatctgattctttttcagtgtatccgcggaatccgtgctgttataatcccttaccaaatcctttgctctgtgccactgtgttaataattctgcatcgccgcagtcatagagctgtcctgccagcattttttctctttccgtcatggctccttactcctgtcttttcatctggttttattataacagagataaaataaaaaggaagctctgtaatggtgcagttttaccggttcagataccgccacaaggtagtcctgctgatacccagcttttttgctgctgcggtctggttgcctttgcaggcattcaggacatagtgcacgatatcccggttcatctcatccagagactggctggtatccaggcagaatggggagggatgggaaaccgccagcctggagttcactggaacggcatccgcgtcctctttggtggagccggagcatgcatggaccgggaacggaaatccggaaaacagaacattttccctctggattacttcctgtatggtttttgcgcagatgtaggggccgtctgtccgtatgacggcctcctttaatatccgcttgaactgggttctgttgtaagggtactcgtattgctccaagagcgcggccgcttcatcgtcaacccccaccacctgccgccccagttcctggttcagggtattgatatagagaccggcagatgagatgatgtcctccttttgttcccttagtggtttgataggcaccagaatgcaccccagggcattggtgtattcaaagaccacgtggggggtggcgcttcccgcggtctgggtgcaggaaaatatcagatggttgcgcacatgcatgttggtgtccagtatgatggagagcagctgcttctgcttgggcttttgtaatgagtccaggttggaaatgtagatggtatttccgttgtccgtaaagggcgagttgtaatgtttggtgatgaagtcccagcttttatcgctgataagagagcagttgatgacgtagagcgggttgtcacacaaggggctctttgcatagtagatatgagccacccggtcctttcctgtgccggtttcccctgttatcataaggctcagaggggacggagacggagccgcatcctcggtattggtaaggatttctctggccagctccgtattgctgtaaaagctgtccataaagctgttctccgcagcctgcttgtccatgatggtcaccccgtattttgagtaggccaggggaatctcggagcgcatgatatggaagatgatgtaggggctcagggtctcatccaccagatgggaggtgatggagtacatctggttgtttactgtaataaagaaggaacgcttccgtccggtgcagcattgctccagttcattctggagctttgcctgtatggggaccgcgatctcatcctccagcgtggtgtagatgcattcgcctgtccgggacagcaccaggaagcggttggcgctgctgtctaagagctggtgcataagggacagggagtggtataaatccctgtgggtctgccaggtatagactgcctggtcaacagcggctttcaggctttccatgctggaggtgagaaggataggggttatgccgatcagcttggcatagttgtagggcaccgtatcgcaaatgacggtcttgtaaccctgctcctttagtttgtccagaagggagttggcttcggacgtggtgttgatggaaaatatatctgtaggtatcttaagaacattacatatgctttttgcaatggtggtcagggaacggaatcccaggaccgcaaattttgtttttgtattctccgctgttttcaggcagagaagaacgtcataataatcaattccaatgtcaatcacagggatgggcacgcctttcgcaatgcggctggcggtattggcccttgaaatgatgatatcatagttcctgtaatgttcctttgccagggaaagtcctgtttccacattgcctagcatggctgtcagctggatatcatccctttggcctgcgtaccgtttcattaatgttaccaatcccttatagggagcaattccaagtatcctgactttttcacccattctgcctcctctggaaaatacagcttccgaatgttgcaattttaaacatattatacaacattttccttgaattgaaaagcccccctatattacaataaactatggagctgacagaggaaactaatatgtttcaaaagtgaacgataaaagaaagttgggagccaatggaagagagatatctgattattgcggatgattttacaggggcaaatgatacgggagtgcagttaaagaggagaggatatccgacggaagtcctgtttgcgggaaaaccagtggattcacaaaaatcaattgtgattgatacggagagcaggaatgccttgcccggccatgcctatgaaatcgtgcgtcattcattagaacaggtggatttcggacagttccgctacataataaaaaaagtggattccactatgagaggaaatattgcccaggaaataaaggcagtggatgaagctttttgcccggagcttgtggtgtttgccccggcccttcccgccttgggcaggaccactatggacggggtgcagtgtttaaacggcgtggaaatctgtaagacagaattatccaaggaccccaagaatccggtaatggaagataacctggtaaagctgctggggcaggtttatgaggaaccggtgctgttaaaatacctgccggacgtaagaagccagtccttttcccttgacgggggccggatctttgtatgcgacgctgagtcggatgatgacctgaaacggatcattgcggcagtcaggcaggacgggcggcgggccctgtatgtggggacggcgggaatggcagacaacatgatggaactggaaaagcccacccttccgtcctttggcgtggtggccagcatcagttcggtggccaatgaacagatgcattactgtgaaagggccggatacgccatggtcaaggtacctgtggcccagctcatgacgggaacagcccggcctgaggaataccgcgacatggctgtggaatatttaaagagcgggagagataccatccttcttacagatacggcttatgaccgggaactgattgagctttcccaggaagtgggagagaaaagcgggatggatttgactgaggtgggggattatgtgcgctcactcataggcaggatggccaaagaggtgctggactcggttgaggtatcgggggtatatctcaccggcggggatacggccctgggtatgctcatgaacatcggggcggacggttccgagatactggctgaaatcctggtgggcgtcccgctggtaagggttaagggcggggcctatgagggacttaaactggtaacaaaggcaggagctttcggcacagaggatgctgcggcgtttgccatgaggaaaataaaagaaagaggaggaatataacccatgagagaatttttactgccttatggaaaggaaacactgaaagcggaaattgaagaggagcacctggccggtgtgcttgtatcagaactccatgattacaaggcacccatggagggaacccagctggtgcaggaggcgctggagcatcccatcgggactcccaggctatgtgatatggccattgacaagaaaaaggttgtggtgatttcgtctgaccacacaaggcctgtgcccagccgcattatcatgcctctcattctgaaggaaatccgcaggggcaatccggatgctgatattaccattcttatttccacaggacttcacagggagacgaccagggaggaactggagtcaaagttcggccctgagattacggaacatgaaaccattatagtccatgactgtgatgacacggacaacatggtttatctgggcaagctgccttcaggcggaaatatgtacattaacaggctggcagtggaagcggacctgctggttgcggaagggtttattgagcctcatttctttgccggattctcaggcggcagaaaaagcgtgcttccgggcgtggccagccgtgagacggttatgtataaccacaactcagcttttattgacgatctgcattcaaggaccggtatcatcgagggcaaccccatccacaatgacatgctgtacgcagccagggtggcgggtctggactttatcgtcaatgtggtgattgattccgcccatgaccccatctttgcagtggcaggggactgtgatctggcccatcgtgcgggcagggatttcctggcttccaagtgtcaggtggatgctgttcccgcagatatcgtaatatccacaaacgggggctatcctctggaccagaacatttaccagtccgtaaagggcatgacggcagcagaggtgacggtgaaggagggcggcgttatcattatgctttccaaggcagcggacggccacggcggcaaatatttccatgagaccttccgggatgaaaaggatttaaaccgtatgatgaagacctttatggaccggaaaccggaggaaaccatcatagaccagtggcagtcgcagatttttgcaagggtcatgttaaaagccaggattgtgtttgtatcttcctgcgatgataaactggtggaggaacttcacatgattccggcccacaccatggaggaggcccttaacaaggcaaaggcaatggtgaataaggaagattacaaagtaacggtaataccggacggtgtgtctgttatcgtaagaggataagaggggggatacggatttgaagtttattttaatacctgattcattcaaggggaccttaagctccagccagatttgcgcagtgatggatgagaagataaaaaagcattttcctgacagcctgaccgtctccataccggtggcagacgggggcgagggatccgtggatgcctttatcacggcagtgggcggtgttaaggagtatgtcacggttaagaatccctattttgaggacatggaatcttatttcggactgatagacgcaggacagacagctgttatcgagatggcttcctgcgccgggcttcccctggtggaggacaggaaggatccaaggcttaccaccacctatggggtgggacagctgattctggccgcagcccgtaaaggcgtgaagaaaatcattgtgggcctggggggatcatccaccaacgacgggggctgcggcgctgcggccgcggttggcattaggttttatgacagggacggcaggcagtttattcccaccggcggaacaactgccgatattgacagaatcgacctgtccggaagggacagccttctggagcaggtggagatcgtcaccatgtgcgatatcgacaatcccatgtacggacctgtaggagcgtcctttatcttcggaccccaaaagggagcggatgaggccatggtccttcagctggatgagggaatcaggaatctgagcagggtcattgcccaggcaacgggaaccgatattagccaggtgccgggaacaggggcggccggagccatgggcgcaggcatgattgcgttctttggatccagacttcagatggggattcagaccgtgctggatacggtgcggtttgatgaaatcataggcgacgcggactacattcttacaggcgagggtaagctggattcccagagcctgcggggcaaggtagtgattggaattgcagagagggctaaaaaacaggccaaatccgtgattgcggtggtaggcggagcagatgacgacgagattggaaaggcctacgatatgggtgtgacagcggtgttccccattaacaggcttcctcaggatttttccgtcagcagacaccgcagccaggagaacctggcttatacggcagacaatattatcaggcttataaaagccggacagggggaacattaagtatgaagattttacaggcagttaagaagattccgggaggtttgatggtagtgccgctgcttctgggagcaattgtcaacacctttttcggaaatgttttgtggagcgcgtttgacggaaccttcaccacatatctgtggaaatcaggggccatgcccatcctggctgtttttattttctgcaacgccactaccataaattttaagaaggccggcgttacgatatataaaggcgtggtcatcacggcggtaaaggttggaatcggcattattatcggactgatttgcggtactctttttggggaaaagggatttttgggactttccaccctggccattgtaggcgctctggccaactccaacggcggactgtacgctgccctggccggagagtacggcgatgcgaccgacgtaggcgcggtatccattctttccatcaatgacggccccttctttaccatggttgccctgggagcggccggtgttgccaagattcccatgtctattctgataggctgtattgtccctgttatcgtgggatgcatactgggcaacctggacgaagatatccgcaagttctgtgagcccggagccactatgctgattcctttctttgcatttcctctgggagcgggactgaacatcatgaacctgttaaaagcaggaggccccggaatccttctgggcgttgcctgtaccctgattaccggtttgggcggctatctgatttataagctgctgcgcatggagtatccggaagtgggcggagccattggaaccacagccggcaatgctgccgccacaccggcatcggttgcagctgtggacgccacccttttagcggtagcggaagcagccactgcacagattaccgctgccatcattgtgacagctatcctttgtcccatatttgtttcttatctgcataaagtagaggtgcgtaagcgtggaagatagaaaaataataggtattaccatgggtgatccggccagtataggacctgagattaccgtgaaggcactggccgaccaatccatatatgaagcatgcaggcccattgttgtgggagatgcctgtgtcctggaagccgcgctgaaaatcgcgggccatgaggagatgaaggtccgggccgtaaaggatgtgagggatgctgtctttacccacgggaccatagacgtgctggacatgggtctggtttccatggatgagctggtgcgggggcaggtgtccgccatgtgcggggacgctgcgttccggtatgtggagaaggtaattgaacttgccatggacggacaggtggatgccacggtcaccaatgcctttaataaggaggccgtgaacctggcaggccatcactattccggccacacggagatttatgctgatttgaccggaaccaaaaactataccatgatgctggcccatgagaacatacgggtggtccatgtgtccacccatgtgtccctgcgggaggcctgcgaccgggttaagaagcagcgggtgctggatgtaatccgcattggggataaggcgtgcagggagatgggaattgagaaccccaggattgcagttgcagggctgaatccccacagcggtgagcacggtctgttcgggcaggaggaaatccaggagatcatcccagccattgaggctgccagggcagagggaatccgggcagagggccctgtgcccccggataccgtgttctccaaagccaggggcggctggtatgacatcgtggtggccatgtatcatgaccagggacacatcccccttaaggtggtgggctttgtctatgaccaggaaaagcaggcctgggacgcggtggccggcgtcaacatcaccctggggcttcccattatccgtgtgtctgtggaccatggaacggcctttgaccaggcgggaaccggaacagccagcgagctgagcctgaagaattccctggagtacgcggtcatgtttgccaggaaccggaagcagaagagtgtataataatacgtgtataaaaatacaggacaccagataatgtaagctatctggtgtccttattattatgaacagtcctttcccgcttacagcacaaacatcctggctgtcatcaattcattgatggaacgggcggtataggaaaccgtaaaatcatcggtcatcaccattccaggataataggaagccctcagggcctggaaatggtctttgaagttgatttccatgacaatggtttcaggcacctccagatggcaggcatcctttgtgagaagggcattcttcgcgccttcctcaataagctcctgggccatctccggcgccaggttgacggtggctgcgcccatgccttccttcactgccaccgccgtgatgccgggatcgtattcatggacatggctgcaaagatttttgtcgccgctgatgaataccgagggaacgcccagggatgcgcccacataggcgtgcatgaggaattccgaagccagtttgccgttgaatttaatgtaattggtcttgcggttcatggtatgggccagggggctgccgttggtaccggcaggagagtggtatcccacgaacatgagggcgtcaaagctctggtccagaccgcagaccatggaatcaggggagtatttccagcccaatatgatttttgcttcctttggaagaagggagatatccatgtttctgccggattcatgggcatcctttatgtagatttctgttgctccggctgccagggctcccctgcatgccgcggctgcctccagggtcatttccctggccatgggaccgtgttccaaatcacctaagttggtggagctccaggaagtggagccagccaccccctcaaagtccacactgatataaaccttcataattttattcctcctgtattctggtttttctaagcaatatcacgttttaaaagtttcagggccagttgggcctgcagctgcactcccagcttaagacattcttcgtcgatatcgaagtcctggctgtgaaggggggctgtaatgcctttttccctgttggcgcatcccagatgatagaaaactccctttgccttttccaggaaaaatgaaaagtcttccacccccaggctggggaatttctttggatggatgtgttggcttccaaggacctcttcggctgtctccaccagcacatccacgatttcgtctgagtttatgagggcggcatatcccgggacaatgacaacctccccgctgcctcccatggcctggcaggtacagcttacctgacgggtcatggcgtcaatgattttttctctcacggcagggtccgtggtgcgcagggtgccggtcatctctgtctcggctgccacgatgttgcccgcggtcccgccgtgtatggtccccagggtgaggactgcgctgtccaggggggagatgcagcggcttaccagggtctgcaggctgtttatgacagcagcagccatgacaatggcatccactcccgtatcaggataggcgccgtggcagctctttccatggacctttatgtgaatctcatcggaggaggcatttaaatccccgtagcggatttcaatttctcctgtttcgtgggtaggcattacatggaggccggctacgtagtccacatggggggattccatgcagcctgcctccaccatgggaagggcgcctcccgtggtctcctccgcgggctggaaaaagaactttacacacccggaccattcactccgggattccatcaatatgcgggccgtgccaagggcaatggccacatgggcgtcatggccgcaggcatgcatatggccgggatgcagggagcagaagggacgggcaatatcctctgtcagaggcagggcgtccatgtcggcccgaagcgccaccgtattgccggagccgggcttctctccctggatcatggccacgattcccgtgcccgccacagggaattcgtaggaaatgccccactcatccagaaggccgcagatataggcgctggtccagtgctccttaaaacccggttcgggatgctggtgcagttccctgcggaaccgtaccagctggggatataattcttctgtccgttgttttatattcatggtgtcatcctttctgcagagctgtatccggtccctgaatcatttcccctcacatagatcctggggggccgtctggtgagccgggccacgatttcgtttttattggtgcctgccagacggctgaccgcgtcgatgtccagcgtgtttccgctgccgtccccgtatataataacctggtcccctatctgtgcctccggcacatcggtcaggtcaatcatgcactggtccatgcatatgactccgatcaccgggacctgttttcccctgagggtgaccatggccttgccacgcaggttccggggatagccgtccgcgtagccaaagggcagggcagccaccctggtgtcctgcggcgcggtccacaggtaatcgtagcttaccccctggcctttcagaacaggagtgatgtggctgatacgggttttaaaggtcagggcctggcggatgtcaagctgtcccttgtgaaagccctttaacccgtatacaatggctccggcccgtatcatgtccagcctgtattccggaaaatcaacagcggcaatgctgtccgcaatatgtttatagcggaaatggcagccttcgctctccagttcattgacagcatccatgaaacaccggaactggacctggttggactggtcgtccttcagggccagatgggagtagatgccctccggtttcagccagggcatggagcagatttgccgtatttcatccaggctttccggacagtccgggaatccgatgcggtgaaaaccggtgtcgtatttgatatgtatgacagcctgctgctttttttcggaagccaggcggttaaggagcctggcctgggccagggtatcaatggtctggatgatgccgtattccagcacatagggcagcagacggtccggtgtcagtcccatgattaacacgggatagcctggataggcctgttttaactccactgcctcggacagggtggacactgccagcaggcaggctccgttttccatgatggcaggcgcaatgcccagggcgccgtggccgtagccgtccgccttcaccactgccgccacctgggtgcccggaccggccatagccttaatctgcctcacattaaaggcgatgcggtccagatccacctccaccaccgtatctctcattatctcattcagaacagggatttccatgtgattcataccttctttccatcttgcggctgaaaacaggggtaaaatctcatccggtcccgcaggccggcagccgcaaatttaattataggtatttctgccagaaaatgcaatgtgaaactgtgtcctttttattgacttttaaccggccagtaggtataatttttaattaagtacgttgggcgaaggtgcagtgaacttactgttctttaagtcgccttttttttatacacagggcggttcagcccgatttcagcttatctaagataaaggtggtatggcaatggcaaagtacataatcaagcggttggtagcaggcgtgttatctctatttattcttattaccattacattctttctgatgcatgtcattccgggaggtcctttcagtccgtctgagcagaggaacgtgccggaaaaaatcctggagcagatttccgaaaaatatggtctcaatgacccgcttccggcccagtatgtcagatatctcggcaatctccttcatggggatatggggacttcctttaaaaaacaggataccacggtcaatgaacttatagccaacggctttccggtatcggcaaaggtgggggcgctgggaattgcggtggcccttgcggcgggaatccccctgggaatcgtggcagccgtgaagcggggaaagctggcggacggcgcctccatggtgctggccaccatcggcgtgtcagtgcccagctttgtgctctgtgtgctgatgatgtacgtattctgtgagaagtggaagatatttccctcttatggcctgacttcgtggaagcactatgtgctgccggtgttctgtatggcattttcccaggtggcctatatcacccgtctcatgcgttccagcatgctggagaccatgcgccaggattacataaggacagagcgctccaagggcgtgccggaatgggaggtcatcagcaagtatgcccttaagaactccattcttccggtggtaacctatgtgggcccgctggtggccacgctgctcaccggtacgttcatcattgaaaagctgttcagcatcccgggactgggacgctatttcatatccgccatcacggacagggactattctgttacactgggacttaccgtgttcttaggcgtgatgattattggctgtaatctgattgttgacatcatgtacgcagtgattgacccaagagtaaagataacggagtaggtgaagaggatggaagagagagttgaatttaccatgtcggatgtgattcccgaggaactcctggcgggactttccgacacagaccgggagatggaatccattaaccgccccagcatctcctactggaggaactgctggatacggcttaagaaggataagctggctatgctgggcattgccattgtggtgcttatgacattggcagccatatttgtacctatgttttccccttatacatatgaccagacagactttggaaatgcccttcagtggcccaacagcgcccacttgttcgggacagacaagatgggacgtgatatttttgtcaggaccatgtacggggcccgtatcagcctgtccatcggatttgcggcagcggccatcaacatggtcataggtgtgctctacgggggcatatcaggctatgtgggaggaaccacggatattatcatgatgcgtgtggtggatatcctgaccggtattcccagcctgatttatatgattttgattatgatgtttctgggtaacaccatacagagtattctgattgccatgtgcctcacgtactggattaccacggccagaatggtccgtgcccagatactgaccctgagggaacaggattttgccctggcagccaaggtctgcgggctgagcaaatggcagattctgatacaccatctgatacccaacagcatgggttccatcatcgtgacggttacgtttctgattccttcagccatattccaggaggcgtttttaagctttttaggcatcggtatccaggtgcccaaggccagctggggaaccctggccaatgacgccatagaatatctgttttcatatccttaccagatgctgtttccggcgctggcaatcagcatcaccatatttgccctgaactttatcggtgacgggctgcgggatgctctggatccaagacttaagaagtaggtggatgaacatgatggaagatacaatattagaggtagagaacctgcgcaccagttttgccacagacgcaggcagcgtgcagtccgtaaggggcatcaccttccatgtggggaagggagagagcctgggaatcgtgggggaatccggctgcggaaaaagtgtgaccatgctgtcaattatggggctgctggaggacaatgcttcccggcaggcggacgccctgctctttgacggtgaggacttgcttaaaaagtctcccagggaaatgaggaagatacagggcaaccggattggcatgatattccaggatcccatgaccagtctgaatcccctgtttacagtaggggaacagattcgcggtcccctgatgcgccaccagaagctttccaggaaggaagcagagaaaaaggccctggttatgctggaggcagtgggccttcccagcccggagcgcaggctgaagcagtatccccatgagctctcaggcggtatgcgccagagggttatgatagccatagccatgtgctgtaagccggagcttctaatagcagacgagcctaccactgcactggatgtgaccatacaggcccagattctggaactgatggcccatatgaagaatgagtttaacacctccgtcatattgattacacatgacctgggggttatatccagcctgtgcaccagggttattgtcatgtatgggggattaatcatggaggaggggaagatcgaggatatcttctaccggaccggccatccctacacggcaggacttctggcctccataccaaagaggacaaaggaaaagctggtgccaatcttcggcacgccgcccgaccttttgaatcctccaaagggatgtccctttgcggcccggtgttcccgggccatgaagctctgcgccgtccatcagccgcccttttgcgacctgggaaacggacatgtcagcgcctgctggcttcacaatgaatcggtgaaagcccggataggggaggtgaagctgtgatggctcaatgtactgataccaataactgtattgaagtaaatgatttgaagatgcattttatgctgaaaagcggccttttttccaagccaaaggtgttaaaggcagtggacggcgtaactttctccattgagaagggccgtaccatgggattggtgggggaatcaggctgcggcaaaaccacggtgggccgcaccatccttaagctgtaccaggcaactgcgggacggattctgtatcagggaacggacatcaccggactgagcgacagccagatggttccctacaggaagaaaatgcagatgatattccaggacccttatacctccctggacccaaggaagaacataggcgacattatagccgagcccatatgggccatgaagctgcacacggggaaggataagaatgaccgtgtcagggagctgatcgagatggtcggcctgaaaccggaccatatcaaccggtatccccatgagttttcaggcggacagaggcagagaatcggcatagccagggctttggccgcggagccggaatttattgtctgcgatgagcccatatcggccctggatgtatccatccaggcccaggttatcaatatactggaggagctgcaggataagtttcattttacctatctgttcatttcccatgatttgtccatggtgcgccatatctcgtcagaggtgggggtcatgtacctgggcaatctcattgagtacgcccaggtggatgagctgtatgacaacatgctccacccctatacccagtccctgatttccgcagtgcctgtggcggacccaaagctggctaaggaaaaccagagaatcatcctggaaggagatgttccctcgcccattaatccggctcccggctgtcccttccgaagcaggtgccgttacgcaaaggatatctgcggccaggttaagccggagttaaaggcggtcaatgacaagcataaggtggcctgccatctttttgattagccggatggggccggattcacaagagcagaatcacagggccagaatcacgggtacagaatcacaggtacagaatcacgggtacagaatcatgtgacggttccggcggtcaggtattcagttgactgggcgccggtggcatatatcgcgcttaggggccggaaaacgcctgctgggtgctcataagaaggaggagtgaaatgagaaagaatgtaaaagtattactgagtcttgtcatggctgctgccatgctggcagggtgcggcggacagagttctgagaaaccggctgagaacggtgcttcggggcagaccacccaggcttcggccgggaaggaagacggagccggcagcgagggcggaaaggtcatgacctacgccatgcagaaggagcctgagacactggaccccaccatgaacaattatgccacatcatccattgttcttcagaatctgtttaccggcctgatgcagattggcccggacggcggcctgatcaatggatgcgctgaaaagtacgaggtgagcggggacggactggaatacacctttaccctgagggacggccttaaatggtcagacggctcccctctgacggccggtgactttgagtacgcctggaagcgtaccctggcccaggatacggcctctcccggcgcctggtatctgttctatctgaagaacggcgaggcatataatgagggaaaggcatttgccgaggatgtgggcgtcaaggctgaggacgacaagacactgaaggtcactttggagaaccccaccgcctactttatcgaccttacagctgtcaccgcttatttcccggtgaagaaggatgcggtggaaggaccggaggcctggaccaagtcagcggacacctatgtaagcaacggagcgttccggctgaaggaaatcaatccccaggccagctatgtgctggagaagaatccggaatacattgacgcagatacagtgaagctggacggcgtgaatattgtgtttatcgaatccgcagaggcagcgctgtccgcttacaatgcaggagaggtggatgtagtggacaataccatcatccagactcaggcacagtcacagtacggcggaagcgacgagcttaagtcctatgatctgataggtacctgctattatgactttaactgcgagaaagactacctgtcggacgcgcgggtgaggaaggcgctggcaatgtctcttaacagggacgtcatcaaccagtccatcgttgcctccaggccggaatcatcctatgcttttgtgcctcacggcattccctatgagggctccagcgaagattaccgcaccacggtgggcaacctgttcacagaggatgtggaggctgcaaaggcgcttatggaagaagcaggatatccgggcggagagggataccccactctgactctgattacccagaacgaccaggagaaaaaagacgtggcccaggccatgcaggctatgtggaaggaaaatctgggagtgaatgtggagattgttacctttgagccaaaggtatactgggatgagcagacagccggcaattttgatatctgctatgacggctggaccggcgattatcctgaccccagcaccaatctggactgcttccttctacagagaaatgaaacccagtgccgctggctcaacgaccaggccaaggaatacgacagcatgatgaaagaggccaggagccttacggacaacaagaagcgcatggagctgtttgaggcaggcgagaagcttctgatggaggagatgcccatactgcctctgtactaccgcaatgcacagcttctggtgaagccgggatgcgagggcgttatcaagacttatattggacatacgatatttaaatatgctgataagcagtaggcatggtgagagagccaggccatagtgagtaagcaaagcgagtaagcaaagtaagtaagcagagtaagaggtgcccacgcctgggaatcaggagtgggcagctttttggccggagcgcgccggaaaacagttttccggtatattccggattaaggatgaaaggacggattgagacagatggtatttccggagagacttagggaaggggacacagtggggctggtgtctccagcgtttcctgtaaaggaagaggagagggacggctgcgtaaagctgctggagggcatggggtaccgggtaaagctgggcacatgtcttgagaacatgtataatttccacaattatctggcaggggatgccggggcccggggagaggacataaaccgcatgtttgcggatccgcaggtgaaggcggttttctgtgtgcggggaggatatggcagctcccaaatcatgaaatacctggattttgacctggtgaagcaaaatcccaagatttttgttggatacagcgacataacaaaccttcactcagcattccagatgtttgggaatctggttaccttccatggtcccatggtgtgctccaacatgctgaaggactttgacgcctacaccaggtccggtctgtttgcggccctcaatatggaggaggagctggagtttcgtaacccgcccggtgaggagggctttaagaccatccggggaggggaggcagagggcattctggcgggcggaaatatatctgtgctggccagggcctgcggtaccttctatcagctggacaccagggataagattctgtttctggaggatgtggaggaaggcattgcctcccttgacatgtatattacccagatggagtatgcggggatgtttgaacacgctgcgggaattctcctgggagattttacggactgtaccaatgaccggtatgacggcacctatcagatagaggaattccttcatgaccgctttggaacctttgatttgcctgtgatgtatcatatcaggtcaggccacgacaagcccatgggtaccctgccctttggcaccatgtgccgtatggacggggacaataaacggctccggttttaccggcagctgcggtagattcaacggaagattcaacggtacattcaacggcagattctgcggcagacgatggctttgtcacagccttggcgcagcctttttcaggctccggaataaggaatttggaaaaggctgcaaaaaaagtgcaaaaaaggacaagaaatttaaaaaaagtgcttgcaatctccagagacatatgataaactatagctcgttgacagcagtcggcatgaaagtgcagagtcacatcaaggctgtcagaagttgtgagtctgtagctcagttggatagagcaacggccttctaagccgtgggtcgggggttcgaatcccttcaggctcattgagcgtaagctctgatgtttcataacttaatatggtgggtatggcgaagttggttatcgcgccagattgtggctctggaggccgagggttcgaatccctctactcacccttttcccctttccgggtacggagaggggattttttttgtgtttgatatcccggtatgatgccgggatattttattttttaaaaatgtatataaatatacatttttatgtcaaatttctttgtcagctgtgtacggtttttaaaatgaattgataaattgttgaaaaatacgagggggagctgttttggagttaaaaaatatgagggaaattagataaactaaccagaaaatatgtgcggtattgaagaaaaaatgtactatgatatactcaaaatcaggagatgagagatgaaaaatattattgatgaaatcaacaaaagatatgaaaatcttactaaatcacagaaaataattgctgattttctgctggagaattatgctcttgtaccatttgaaacattaaatgaaatagcacatagaatcggactcagcaccacgtccttaatccgtttctccaggacgatggggtataaggactatacggatctgaagaaaaacatacaggatttgataaaagtaaaggtaagccttccttccaggtttggcgagttatctgaacagggagggactcccaatgatttgcttcttcggtgcagggacattgccgtgaataatatcgaggccacattaaggcttcaggacacagaaaagctggatttggcggtagactggattagcagtgcaaatcataattatgtgttgggacttaggacatgcttttctcctgctttttacctggctgtggtgctgtctcagataaagaagaaggtccggctgattcaggggattgccagcacatatcctgaggaaataacagatgtggaagagggggatgtgtgcactgtattctcctttccgagattttataaggaaacggtaaatatagcccatttcatgagaagaaggggagctaaagttataatcattacaggcaaggatataagacctgtcaaaccatatggagatattatcattccgtgttccgccgtaggcccctcctttaaggattcctacgtggcagtccattttctcattgactatattatttcaagcatagctgcaaaaaataaggatgagggaatagaggtagtttcaaaaattgaagagatattaagccaaaattatttcattggcttttaatacttttaatcacaaagcgcgctgttgattgaaagcaaaaagaaaggagataatctatgagttcaaatgaacgaaagaaaccaagctttttgtttgcgttactgatcatggccgctgtttgtgttgtggttattgtcccttatatgaaatggggggtatctatggccgccaccttctttttatcgtggctgtttgtcattccggcctgcatgtccctgggatttacatacgaggaacttgaaaaggcggcagtgtcttactgcggaaagattattacatctgtatttatcctgttgtctgtgggaggcatgattggcgcatggattgccgcaggaacagtgtctgcgattgtagatgtgggacttcggatgataacacccaaaatttttcttctggttacgtttattgtcggagcgctgtacgcaatggcgtgcggtacttcttgggggacattaggtaccattggtattgcgatgtctgccgtgggactggggctaggagttcccccggccatgacagccggagcagtggtcagtgccgcgttcctgggagacggcttttctccgatgtcggacagccctaatttggcatccgcggtcacaggggtaaaattgatggaccatgtcaggcatctggcaaaaatacagtttccggccttcatcataagcgctgtattatataccattttaggatttgtatacgcaggcggagaggtccaaaatgagaccacgctaatgataatcaaaacattaggtgataactataatgtgggattgattgccttcctgccggcgcttatcgtaatcatactgctcctgcttaagaagtcggcgatcatctcaatcctgataagtgctgccaccggtattggcgtagctgtcatttaccagggaaaatcattggcttatgtgctgacatgcttctggtcaggtgtaaagagcgataccgggatggaacttgtggatacattgctgtcaagaggcggagtcaccagcctgttttccagtgcgtccctgtatctcatcacattcggccttatcggtatattgacccaggccggtgttctggatgctgtggtggcgccgattgttaataaagtaaagacgggtttccagcttctcataacaaccattattacaggtttcttaggagatgcagtggggtgttccggttcttttgcctatctttttgcgggaaacctcatgaaaccgctctacaagaaaatgaatgtaagcgatttagatttaaccagaaatctggcctgctctgttacccctttagggccgttgattccatggaacatgaacgctgtcattgctctggatcttttgggggtatcctgtttccaatatgcgccctactgtttccaggcatatgtcatgccggttctgttaatcgtcaattatctgctatttaataaaaggggaggacagcaaaatggggaaaattaagaatacagagagtcttttaaatcatggagacagggaatccaggaaaaagattacagaactgctggagcgcatgtgggcaaaggtggacgcataccatctgattaaggaacttatgtctgtggacggtaatcgtctgaccattggtacaaagcgctgggatatggataaactgggcaatatctatctttttggcgcgggaaaagcgtgtaatgccatggccatggccgtatgtgatgtattgaaggagaagctgacagaaggtgttatatccgtgaagatagcagaggataacgatacctatatcaataccagggtctatgtgggaggacacccccttccaaatgaagaggggtaccgggccgctgaagatataatacaaatgattgataagggaaagccgggtgacctgttcatctctgtcatcagcggaggcagttccgctttactgacatgccccaaagagggcatcacattgcaggaggagatacaggcccaggatatgctgctgcgctccggcgcgaagattgaggaaatcaatgcggtcagacgccatatttccagaaccaacggcgggcgccttgcggagcaggtacttaaaaatggcgctgagattgtaaatataattgtgggagacggtgtgggggtaaagcctactgtagatttcaaggcaccgttccagtttttcggcacaccggtggctccggataagactacgatacaggatgcgcgggactgtatcaggaattatcagctggaggacaagctgccagagtctattttaaaatatctgtatgaagataatccggagcatgagaccccaaaagcatttggagagggtgtgacgcacttctgccttaacaatgtaccggattcatgtgaagctgcagtggaagctgccagggaaatgggaatcagctccatggtattttccacctttatcgaaggtgaaagccgggaggcaggatacttctttgcctccatggcaagggagatacaggctaatcacagaccgattaaggcgccctgctttgtattctgttcaggggagaccacgacgaaagtggaggacggatgcaggggaacgggaggtccttcccatgagcttgcattgggatttgcccatggtgccagatacactgcgggcgcagcccttgcatcggtggatacagagggcacagatgggacaaccaggtatgcgggagcactgacggattcacagacattgcggatgctttctgaaaagggtattaatatttttgacgtattcagaacccacgattgcggcggggcgctggagtgtacccaggattccatacttacaggaaatacagggaccaatctgtgcgattttaacgtgatgtatgtaccggaagcggaataagggaggaaaataggatgaatggaaacagaataaaggaagtaaaggcaagacaggtactggactctaagggaaggcctgtggtagagactgaaatatatacggaaaatggtaagatgggaagggcgggagcatccactggcacgtctgttgggaagaatgaatcgtatgtattaagggataacaataaagagttatttggcggcctcagcgtttttaaagcagtaaaaaatatcgaggaaatcattggtccggctttggttggtatggatgtgacagaccagcaggcagttgaccataggatgatagagctggacgggaccagatataagacgaatctgggaggaaatgcaatctattctgtttcctgtgcggccgccagagcagcggcggccagcgtgggaaagccattatggaggtacctggcagaggaagagccggagagggtatttgcgccggcatataatatgattaacggcggtacatatgggaattatacccttgcatttcaggagtttattgtgattcctaaaaatgtaagtacattctatgaggggtccagaattggggtggagatattccagaagatgggagatatcattaagaaatacaacaatggaaaaccgcccgtgatgggtaattacagcggatatggcgccccatcggatgacccgtttgtattgtttgatatgcttatggaagcagcctcatcattggggtatgaagataaaattatattctccatggattgcgctgccagtgaaatctatgatgaggcaagggacgcatatctgtataagggaacgtatatagacagggacgaaatgatctcactgctttccaggatcgcgcataaatatccaatcgggtttattgaggatgctctgcaggaagaggactttgagggattcaaaaaagccaggaaagagatacaggctgtattgatcggagatgattttatatgctccagcattgacagggccaagaaagcaatcgacatggacgcgatacagggaatgatattaaagcccaaccagattggtacactgacagaggcaattgaaacggtccgtttcatgaaacaacatgatttgctggttgtggcgtccggaagggcgggaggagtcattgacgacccaaacgctgaattggcaattgcgttaggcctgccaatcatgaaaacaggggcgccaagaagcggggaacgcactatattcaccaataccggactcagggtagaggaacagttgaagccgggaaagacaatggcggatgtacttaaggttccgggatttgaacggctgggatgatatatcggatactttcacagataaaaaacggggaatcctgtaaaacaggtttctccgtttttttatctgttttactcctttatatagtataatactgtatagataatgcataaaaaggaggttatattttgaatatcagacaaattgcgtacctggcgggggtttcggttgcaacggtttccagatgcattaatcagccggagaaggtgtcggaggaaacacgcaatcatatcataggggtcatgaagcgggtggactacatacccaacccctccgccaaaagcctgtcaaccggttatacaaagaccatcttatgtgtaatcccgaccctttgcaatgaatttttcaaccagctggtggaaggaagccaggctgtattgagggaagcggattataaggtccttgtattttcaacagacagcatagaggatttctggcgcagggtggaccagagaagtgttgacggaatgattatatccggctccggttttattaacagcgaggagctgcgcatggccaagattcaggtgccctatgtattgattgaaaatatggagcagtcggaatcacccaaggatgtgacatacgtttacagtgatgattacaaaggggtccagatggcgttagaatatctgtaccgggaaggcaaccgcgtattcggggtaatcagcacttctgacacttatttggtgacggagaggcgccgtaaggcggtatatgactttttcatggaaaaaaaggactgccgtctgtgcatggtgaaagcccattatgcagatttgcaggatgcatatgacgcgtgcgggcatttgatgcggctggaggagaggcccaccgctatttttgcctttaacgatatgatggcaattgcggcaatgagatatctggtgcttcacggcatacgtgtgccggaggatatggagataatgggattcgacgacaatccggtggccagctttgtgctcccctcgttgtcaaccgtggttgcacccaattaccagcttggggaaagtgcggccaggctgctgctggaaaaactgaggggcaatacagagagtaaaagtgtgttgtttccggtggaattaaagctgagggaaaccaccagaaataatgtaaaagagtatagagacaagctatagattccgcccacggcatagaaagtctgatgtaaccagtttcatccggaaactggtttggattcgttgacaatccgtttttttttgatataattaagaaaaacgcataataataaacaaaaacatataacaaaattgtgtatattgcacaagagaattttgcgcgttaaaaaagatacatgtaaaaatagagtataaaataaaatgatgttctgccccggaaggagtacacggcatggtaaaaattatcggaatatgtggaagcccaagaaggaaatcatcctatgccgcattgcgggaagcgctggacggcgcactggaaacaggggacgtggaagtggagctcattgaactgcgtgcaaggaagctgaacttctgcattcactgcaataagtgtctgagagaggacgcggtccgttgtacagtatatgaggacgatatgacccctctctatgaaaaggtatatcaggctgacgggatgataatagcatcaccggtctatgagatgaatattacggcacagctggcggcctttttcaaccggttccgccctacctggaatattataaaaaaggatcccacattttttaaccggaaggtgggcgctgcgattgcagtaggaggaacaagaaacggaggacaggaaggggcactgaacgcaatccttggattttaccatacacagggtatggttgtctgcaacgggggagcgggaacttacgcaggagccagtctctggaatccgggggacgggtcaggggaaatggacgacccggaaggattaaagagagccagggcactgggtgcaaagatggctgatttgacaaaacgactcaatttggataactaagccggaacggattcaaactaccggtttccataaggataccgcataatgtttatttgcccttgtgtttgtctttttcaaataaacagacaggtattttgtggaagccctgccaattcctgacaaaacatggcgccgattcgtcaggtaaaagttttgaatataaaaaataaaaggagaacttcatacattaggcagaaatggcgggagtatcagaaacaggagttagttatgagaatgatgagttatggtatcgaagacaaaccccgattggcagtagcgtttccattggcattccagcatgtactatcggcatttacaggacagattgcggtaggtatgctgcttgcgatgggatttgggctcagtgtcaaagaaactgctttattaattcagtgtgcgttatttatcaccggtatagctaccattatccagtcctttggaatcggaaagcatattggagccagactccccattgtatcaggaggcagctttacgctgattacaccaatggtggtggcggccaataaccccaatatcggaatcggcggagcttttggggcggccctggttggaagcggtgtattgtttattctgggtcccattgcaatcaggtacttacataagtatttcagccctaccgtcacaggggcagtggtgctgaccgtgggtatctgtatcggcgcaacggcattcggaaactttaatgtggaaagtgaaaccgcgatgactgaattggcgattgctgtaatggtcgttgtggtgattgttcttctgaacttttttggaaaaggccttatcaaacaatgttgtatattaatcggcatggtaataggatacgttgttgccgcggcccttggcatggtggatttttcaagcatcggagaggcttcctggttttccatggttaaaccctttgcatggggagtgaacttcaatgtgggagcaatcctgacaatctgcgcggttcacatcggcaccctgatggaaatggtgggggacaccacggggcttgtgacggcggtatccaaccggcttcccacctcggaggaattatccaggaccatccgaggcggaggtatcacgggaatgtttgcatctgcctttaacggtgctccggttattacgggaagcgcgaatgtgggcattgttgcaatgaccggcgtgggaagccgctttgtcaccggtttgggaggaatcattttccttgcttttgcggtatttccaaagctggcccagctgcttgcgctgattcccaactgtgttatggcaggagctgtccttgtaatgtgcggtcagatatcggcgtccgggctccgggttatcagcatgggcgattttacggagagaaacacaaccatcctggccattgcgctggctattggcatcggcggcaatttcggagtggctaacctggcatttctgccgtcaaccgttacaaccatttttaccggcattcccggtacggccctggttgctcttgtgttaaacatgattcttccaaaggcagcagaggatgaagtgaccgacgtaaagcttgaaggggaaatgccggccgtgcagtaaaaagagcatacttattattttaagaggatatccacatggagcgccttgcaccatgtggatatttttaggaaaacagctggaaatgagagggcctttactatgatatacgtggagacgaacagtattatcggttcggaaaatctggcttttgaggaatattttttaaagaaagaggacatcagagagcccgtactcatgctgtggaggaaccgtcccaccattgtggtaggcgcttttcagaatacccatgaagagatatgtgaggagttcgtcaaggccaacaaaattgatgtggtgagaagaaccagcgggggcggcgctgtctaccatgacttgggaaacttgtgtttcagctttatcatggagcatggggattttacaaacacagactactctgcttttttaaaaccggttgtagaagcgcttcggggaatgggaatccaggctgggattaacgggcgcaatgacctggttctgggagacgccaagatatcaggaagcgcggtaagaatctataagaaccgggtactgtttcacggaacactgttattcagttcagatttagaaatactgagcagggcattgcgggtaaaacaggataagctggtatcaaagggtattaagtcggtgcgttcaagggtaaccaccatagcggaacatctttcctatgacatggatgttctggaattcagggaaagactgctgcaggccctttttggggaatcagggggaaaggaatatgaaatatcccggaacgagcgtagggagattatgtgcctggcccgtgacaaatatgaatccttcctctggacgtatggaaagaacccgccggcagacctgacacacggaaaacggtttgggggaggcagcataacggttaaggcatctttaaagaattcgcggattgaacaaatccggtttgagggtgactttctgggatgtatggagatgaaagatatagaacagctgctgaacggagtggtttatgagagggacgccgtcagccgcgtttttgaagaattagatataagaccatatttcggaactataacaaaggaagaagtggtcagctgcattatgggagatgacagaatataaacacatgggagtgagacaatggaacaggtaagtctggatataaacggaaagaaaacacaagtcagcatagaaaaaaactggaccctgctattcgtgctgcgggaggttttgggattgacaggcgcaaagtgcggatgcagcaccggagactgcggggcctgcaaagtcatcattgacggagaagcggtgaattcctgtctggtgcttgcacggaacctggaaggaaagaagattgagaccatagaaggcctttcaaacggcacggagctgcaccccattcagcaggcgtttatcgacgccggggcagtacaatgcggatactgcacgccgggaatggtgatgtcagccaaggcgcttctggaccggattgagaatccgacagaggaggaaatcaggaacaacggcatctccaataacctgtgcagatgcacgggatacgttaagattgtggaggcaatcagactggccgcaaggcggatgatggaggcaaaggccgggggaaagaaggaggagagctgaatgggaatcataggacagagcataccggtccgcgacgcggccatgaaggtaaccgggcagttcaaatatacggctgacctggagttccccggaatgctccacgctaaaatattgttcagccctgtgccccatgccagaataaagaagattgatacaagcagggcagaggcactggagggcgtccgcggagtggtgtgctatttaaacgccccggacacaaagtataacagctgcggggaagagattgacggtcacaaaacggaacgggtatttgatgatacggttcggtatgtgggagataaggtggcggccgtggcggcggatacggtaaagattgccgagcaggcagtgaagttaatccaggtggaatatgaggaacttcccttttatactgaccccggagaggccctgaaggaaggcgcgtatcccattcacggtgaaagtaatattatttttccggtggatatgggggccggcgatgtggaagcgggctttaaggcagcggattatatatatgaagatacctattccacgcctgccatccaccacagcgccattgagacacatgcatccattgcggtttatgacagcagcggcaagctgacggtctatacgcccagccaggatgtgttcggatacaggaagaacctcagcaggattttcggacttcccatgagcagggtgcgcgtggtaaatcccggcatgggcggcgggttcggaggaaaaatagatacaataacagagcctgtgacagccctgctggccatgaaaacagggcgcccggtaaagctggtttacaacaggcgggaggatattgtgtcgtccaggaccagacacggaatggaaataaagattaagaccggtgttaaaaaagacgggaccattatatcccaggatatgcaggtcataatcaatgccggggcatatgcgggcgggaccatgagcattgtgtgggccatgagcggtaagttttttaaaaaccacaagacgcctaatatccggttcagggccactccggtttataccaacactcccattgcaggtgccatgaggggctttggatctccacaggagttctttgcccagcagtgccagatgaataagattgccagagacttacatataagcatcattgacatgcagttaaaaaacctggttgaaccggatgggtttgaccagaggaacgggcagaggcatggaaatgcaagacccattgactgtgtgaaaaaggggatggagctgttcggctgggaggaggcggtgaaggaacaggaagaatccggggcggcaaagggcaggtaccggattggagtgggaatggcagcggccacccacggaaacggagtgtacggcgtgtgtccggacacaaccggcgtgatacttaaaatgaatgaagatggttcggttgtcatgttcaccggggtcagcgacatgggcaatggttccgtgacaacccaggcccaggcagtggcccaggagctgggaatcagcatggaccggatagagtgtatacaggcggatacagatgccaccatgtatgatttgggaaattattccagcagaggtacgtatgtgagctgcaatgctgctgtgaaggcggcagggaaaatcaggcaggaattgctgaaagaggcggcccagctgctggaagaggaacagcagaacctggaactgaaggacaacggggtttgtgtgaggaacaatcctgaaaagaaggcctccctggaggaagtcatcacgcacgcaaggaaagtgaaccagagggatatatgctgtgcggacacatttgcctcctatgccctggccatgtcttacggcgcacattttgtaaaagtatcggtggatacccggaccggcggggtaaaggtcctggaatatacggcggtgcacgatgtggggaaggcgctcaatcccatgtctgtggaaggccagatcgaaggcgcggtgcagatgggacttggatacgcactctcagagggaatcataattgacagcgggggaaaggtaaaaaacactacctttaagcagtaccatattatgaatgccggtgagatgccgcctatcaaggtgggactggtggaggagacagaacccaccgggccatatggggcaaagagcatcggggagtgttcggtggtaccctcagccggggcaattgcaaatgctgtggccaatgcaatcggatgtgaggtgcaccgtctgccgttaaaaccggatacagtgcttgaactcctggcccgggaaaatgagacagttgaaagaagggatggaatcaccttatgagatttgaagataaagtagcggcaatcacaggcgcgggccaggggctgggcgcgggttttgcaaaggcatttgccaaagagggcgctgtcgcagtcctgataggaaggaccggaggcaagctgcaggcggttgcagaggaaatcaggaaagagggcggccgggcccttgtgaaagtctgcgacatcgcggtgcccgaacaggtggagcagtgcttcagggaaattgaacaggaagcgggaagtgtggatgtgcttgtcaataatgcggcctatcacaagtcggttcccgtggttgagacatcaaacgaggaatggctgagccagatttccattaatctcaacggaacctttttctgcacaaaggcagtcctgccggccatgatacggaaccggtacggaaaaatcatcaacatcagttcctcggccgccaaacacttctttcccggatttggcgcgtacgcagcatcaaaaggcggaatcgtaagcttcacccatacgctgtccgaggaagtcaagaaatacggaatcaatgtgaatgccatatacctgggaatgaccaatacggagcatacaagggaacggatggacagcgatcaggcagtgaccattgatttggattccatgctccaggtggaggatgtggcggaagtggtgacatttctggcatcggacgcagcggccccgattatgggagcggccattgatgtgtttggaaagaaatcataagcaggttgagttataagcaggttgaactataagcaggatgaaataaaacacggaggatcatacatgctgaatattaacgcaaaagcaatgaaagtagtacgggagattatagaggacgcggacgcccttgggtgtaaggtgatcaaaatggactgcggggcaaccctcattgacatgggaattaactgtgagggaagctggaaggcaggggttctgttcacaagggcctccatgggagatatgagcacggttacccttggggaattcaggctcaatgaggattatacctttgcttcggtggaagtgctggtcaacaagcctcttattgcctgcatggcatcccagatagcaggatggaaactgggtgacggggaattcgcaaccattggttccggccctgccaggtccatcgcccatgtggactcagactggtactttgagatgacggattacagggaagaaaataacgaggcagtgctgtgcctgcaggatgtgaagtatcccacggaccagatggccatggaggtggcaaaggcctgtaacgttaagccggaggatacgtatatccttatttccgacagtacctgcgtggttgcctccatccaggtgtcgggcaggatgctggaacagacctgccacaaaatgtttgagaagggatttgacgcgggacagattgtgatgatccggggaaccgcccccatagcccccattgttaaggatgaaatgaagtcaatgggccgtatcaatgacgcccttatctacggcagcagcgtggaaatctgggtggatgcatcagacgaggccattgagaaggtgattccgggactggtaggcaagacttcgtctccctgctacgggcaattatttgaggatgtgtttgagaaagcgggaagagacttcttctatgttgatcacgatgtgcattccctgggaagggtgcagattcacaatattaatacgggaaaggcattctgcgggggagaaataaattacaaggtattggaaaagtcatttttatattaatttaaatacgcaatggcgaagaagaggattaggaggaaataaaatggcactaagtaaagaacggcttctgaaggtataccgggacatggtaatgatccgcagatttgaggaggtaattgaggagtatgctgcaaacggaacgattcccggattcgtacatctgtccattggccaggaagcgtgtcaggcaggtgtggtggacgccctgaaaaagacagattataagttcccggatcacaggggacacggagccattgctctgtgcggaacagaccccaaattagtgatggctgagatatttgcaaaggagacaggaatcaaccacggacggggcggctccatgcatgtcaatgacctggagtgcaggaacatgggatttaacggaatccagggctccaccatggtgacctgtctgggaactgcatttgcctctgtgtacaatgggacggatgacgtaacggcagtattcctcggagacggaacactgggagagggaacctgccatgagagcatgaatatggcggctacctggaagcttcccattatctactgtctggtaaataacggatacgccatatccacgcgctacgaggaagcccatccccagaaggagttaaaaacatggggcgagggatacgaagtacccagcttccgcctggacggaaatgacattgaggcagtcatcgaggcagtggaaaaggccgcggaccgcgccagaaagggcgagggccccactgtactggaatttatgacataccgctggcagggacatttcgcaggcgatcccgccgcttaccgcccggaggacgaggtatcttactgggtcaatgacagggatcccctgaagcttaccaaggcaatcctccttgagagggagcaggttgagccggctgtgctccaggcggttgaagaggaagaagaaaaacatgtgcaggagatgcttaaattctctctggagagtgagtatccgggaattgagactgcaacaacatatacatatgctgatagagaggtggaattaagataatgggcagaaaactttcttatggaatggcaatcaatgaagcgctgcatcagatgatgggagcagatgaaagagtatttatattaggcgaagatgtggcaaagatgggcggagatttcggaatcacaaagggaatctgggagaaatggccgaaccgcatcaaggatacggcattatcggagtccgcaattctgggtttatcctgcggggccgctgtgtgcgggttaaagccagtaccggaaatcatgtttgcggactttttaggggtttgctttgaccagctgacaaacaacgccgcaaagttaaacttcatgtatcagggaaaggcacactgcggtataacggtgcgtgccgtacagggcggaggaatccggtgtgcttaccatcactccgcatgtgtggaatcctggttcatgaacacccccggacttgtggtcgtatgccccaccaccccttatgaggcaaagggaatgctgatctccgcaattaaaagtgataacccggttctctttttagagcataagaccctttataatgtaaagggagaggtgcctcaagagatgtatgagattcctctgtacgaggctgaggtggagagagagggaagcgacatcacaatcgtagcaacccaaatcatgcttgacaaagcccataaggcggcggacatcatggcaaaggaaggggtcagcgtggaaatcattgacccgagaaccatttatccttatgacaaggacacgatccagaaatccgtggcaaaaacaggccgcatcattctggcgcaggaaggtcccaaatgcgggggctggggagccgaactttccgccatgataagcgaggatgtgtttgagtatttatgcgcgcccattaaacgggttacctccctggattccccggtaccgtacgcgccggtgctggaggattacgtactgccgcagctggatgatctggtaaaaacctgccgggaattgatggaatattaaatatagccacaagtggagattgagaggaaatacatatggttacaaaagtaattatgcccaaattcggattgtcaatggagacaggagtcctgggctcctggctggtggaagaaggggcttctgtcacaaaaggcagcgctctggcagaaataacaacagataaaatcaccaatacgtgcgaagcacccaaagacgggattctccgcaaaatcctgcttcccgaaggggaggaggctgcctgtggggaggccatagcggttctggcggacacggcggacgaggatatatcggcggagtgcgggggaggccagagtgaagggggcgcttttgcggacagcgcagagcaggcggctgcagcatcccctgtcccggaaaaggccgccccggccgatattaaaatcacgccgcgggccaaaaaggtagcagaggagcaggggcttgaatattcccacatccagggaaccggcctgttaggcgcaatcacaatttcagatttgaagaaacatggaattcccaggaaggacccggcaagcgccgcctctgtatcagctgctccgtcatcggcgtccgtcccgtcatcagcatccggttcgtcatctgcatccggttcgtcatctgcatccggtccgtcatctgcatccgccccggcatctggtccgtcaaccgcatctgccccggccgcagcgcctaaggcagtctttgacacacggccctgtgaaggcgaggatgtcattgtcaagatgagcaccatggagaccgcgatcgcaaaagccatgcagaacagtctgctgacaaccgcccaggccaccatagccacagaggcggaaataacggaactggtcagggtatacaaacagttaaagggaaaatataccaatgcaggagtgaagctgagctataccgccatgctgataaaggcagtggccatggcattggagaaccacaaggctctgagaagcaccatggcggacgagaaccatattaaaatcagcagccgtatccacatcggcgttgcggtggatattccgggcggtctgattgtgcctgtgatccgcgatgcaaatatgaaggatctgcgcacaatctgcctggaattatcagaccttacccagcgggctaaggacaataagcttacatccgaccagctgggcggcgcgaccattaccatcaccaacctgggcatgtttggaatcacctattttacccctgtattaaatgttccggaatcagcaattttaggcgttggagccattatcgagaagctgatggtaaaggacggaggcttctatcccgcatccgtcatgaacttcagccttacccatgaccaccgcattgtcaacggagcgccggcggcaagattcctgaaagaagtgacagccagcctgcaggattttaaatgggtttaaaaagtccttaaatattcattcccgctatctgcgcgccaacaggaggaaagccatatgaaaaaagcagacgttatgattaaaaatgcatatatcataacaatggatcatgacagaaacataatcagcaatggatgcattgtgattgataaagacaagattacagcggttggaggcggggaactggcatcctgctacgaagcctccagggtggttgacgcaaagggaaagttcgtatttccgggcatgataagcacccactcccatttgttccagaccatgttaaaaggcctgggcagggataaacttttgtttgactggctggacagctccgtgcgtacggccctgcaccggtttgacggggaaatgtgttactacgctgccctgactggatgtatggaagccattcagtcaggcaccaccaccctattggactatatgtactgccataccagcccgggtctcagcgattatgtgacccaggccatggaggatatcggaatacgcggcatatacggccggggcttcaccaataccgcaaatttcccgccggaatttaaggtggcccatcacgatacggaacaggatatgtttgacgatgtgaggcgtctgtacaaaaagtatgaagggcacagcagaatgagcgttgccctggcgccgggcatcatctgggacaacacggacgacggctaccgggagatgcgcaaaatggccgatgagatgcatattccccttaccatgcatgtgctggaatcagaggatgacgataagtactgcagggaagtaaggggaggaaggaccataccccatctggaacgcctgggatttatcggacctgattttatcgcggtgcactgtgtctgcatggaagaggaggactttgacatcttcaaacagtatgatgtgaaggtcagccacaatccggtgtccaacatgattcttgcctccggcgtggctccggttgagaggatggtaaaggaagggctgacagtcagccttgcttgcgacggctcagccagcaacgatacccaggatatgatggaggtgttaaagacaaccgccctgctccaaaaggtacatttaagagacgcggccgccatgccggcctccagggttctggaactggcaaccctgggaggcgcaaaggcagttatgcgggaaggggatctgggggcaatcgcggcgggaatgaaggcggacctggtaatctacgaccccttccacggccgttccataccggtacatgacccggtcagcgcaattgtatattcttccagtcaggcaaatattgagtctgtcatggtggacggcgtgtttgtaatggagcacaagcgcatgaccatgattgatgaagaaaaagtattatatgccacccagaaggcggctgaaaagctgataaacgaagtggggctgggcaacacgcagtggggcaggaagattggaaacctggggctataggaggaaatgaatgaacgaattagtgttctttgaaataccaaaacagaatttaaagattcaaattgtcaaaaaaagtgatgagattttggaacagataaggaaagaatctgccgagacagcggtgatgccggatgtggctcagtactacacggatatttattttccaaaagcaccttcagacaggccctatacattttcctccatcgtgctttcttcggacggcaaaatggcctatggggataatccctccggaccgctcatagcaaaaaataactttctggacccggacggctccctgggggatttctgggtgctgaatgtactgcgggcctatgcggacggaatcatcataggcgcccgcaccctgctcagtgaaccgggcatcacctgccatgtatatgaggaacgtctgaccaggcagcgcagggaagtgcttgggaagaagtaccagccctgcggcgtgattgtatcgttagacggtacggatattccctttgaccattatattttcgatgtagacccaaaggaagagtataaactggtgatagccacgtcccccaggggcgccgaatacataatggccaattccccgctgaagcatcctgtaattgggccctttaagacaattgaggatgtggatcatgcggatttgggtgagctttacacagattttaacgcgttcccggttatagtgacgggccagggagagaaccccgatacaaaggtgctcatgtatgcccttaagaaatgggggctggaaaagctctgtatcgaggcgccgtcctactgcacccatttgctgcagcagggaatgctggatgaatactttatcaattattccatggtatttgcgggcggccaaaaatcgccgggctatgcatcggaattcgggcacatggatcatccccacgcagattttctgacactgggaatccatgaaagcaatttcatatttacccgtcagaaaattcgttacggtgttacaaatgagacggatttgtcgggatataagtactgatacggagtgagtgtcagatgggaggaactatggcaggtacggatttggtggtaatcggcgcaggaccgggcggatatgtggccgcaatcagggctgcgcagctgggaatgaaggtagtgattgcagaaaaggacgcatgcggcgggacctgtctgaattatgggtgcattcccacaaaagcgctttataaaaatgcccaggtaatgggctatatggaccacagcagggaatttggaattgagattgacggatacaggctggatatggagcaggtgcaggcccgtaagaacaagattgtaaagacgctgaccggcggagtggaatatctgctgaagtccaataaggtggccattgagaagggctgcgctaaaatcataaaagccggtctggtggaagtgaccggcaaggacggcactgtaaagcggctggagacaaagcggattctcattgcatccggttccaaatcatccaggcttcccattgaggggatggacctggagggcgttattaccagcaaagaggctctggatatgaagacggtgccggaggaaatcgtgatcatcggcggaggagtgattggcattgaatttgccggcatttaccagtcctttggcgcaaaggtaaccgtggtggagtttatgccccacatcattccgaatgtggacgtggaaatcacagccagattaaagagtctgctggaaaagcgcggtatttcaatcatgacaggatctaaggttgagaagattgagaaaaaaggaaacaatctgtctgtgcaggtggatgcaggcggcaaaaagcaggtactttcctgcggacaggttcttgtgtcaaccggacgtgaaatggacgcggatggcctgaacctggatggcgcgggagtgcggtatgaccgcaaaggaataaaggtagacgaaaattatgagaccaatgtgccgggaatctacgcaatcggagacgtgacaggacgcgtcatgctggcccatgtggcatcggaggagggcaagacagctgttgagcgcatggcaggagagaagacagaggtggattacagcctgattcccaactccatttttacctttccggatgtgtccagcatcgggttatcggaagaacaggcaaaggagcagggaatcgaatatattaccagcaaataccagttctccggcaacggcaaggcccttaccatgggggacgccgagggtatggtgaaggtgattgccgcaaaagacaaatccaggctgttaggggtacatatcatcggccccaatgcaagcgatctgattgcggaggcagctattgcaatgaacggaatgtttacggtggaggaggcagccggtgtcatgcacgggcaccccacgctctcagaggcctttgacgaggcggtatccaatctcctgggaaaagccattcacatgccgccggtaaaaaacaggtaatcaggaaaaggaggcgcgcacatggaactgagagtaaacgaccccggcctttttatcgaggaactggtattccaaatcaggccggaactggtaaaacgttatgtggaattagaatatgaaatcatggcaaaagagctggctgggctggatggcttttgcgggtggcagatttgggtgagcgaaaccaatcccggccgtgtgacgtctctttatttctggaaggaccatgcatcctaccggaatcttgaccaggaatggctttccgggaaaaaggatgagataaccagggcgtttggggctgaaaacatgacgtttgtgagggcgggtcatgaaacagaccgaaggtaccagatgcgcagtctcgcctgatgggaacgatccatatcaccctggtggccaatgcgggcttgttattggagtccggggggcggaagctgctgctggacggtctgcacagccaggagaacgggatgttcagtcctgtgcctccctgtatacgggagcagatcatgaaaaggattcctccctttgacggaatcagatgggtggcttttacccattttcatgaggatcattttgatttggacctggtaaaccggtatttgcaggaggcagcacctgagatgctggtgatgccggaggatacaccgaatggcgtatcctcaaaacttaaggcaggcgtatgcagcacagaggtcattgagctgccgatgggccagtgccggagcatacgtctgtgggagacgggaagcctgacagcctttccctcaaggcatgcgggcagggagtatgagaaggtcagccacctttgctatgtgctggaggctgacggaaaaaaggtattgatcctgggagactcggattatgacaccgtgttttttaaacaaatggcaggagcaatggaatttgacgctgtgattgccaatccgctttttctgcatcttcccagggggcgcagggtgtttacacagtccatacggacaaaagagattattttttgtcaccttccgtttgcggaggatgaccagattcatttccggaatatgatgtcagaagacatgagacaatatgaaacaatactgccacccatgaaggcgcttacggatccgcttcaaaaagtgagcatttagtatgtcaggaggatataattgtggggcagaatatattgattgaaatatcagcaagacacattcatttatcaaaagagcatttagagatactttttggggaaggctatgaactgacagtgaagaaaatgttaagccagccaggacaatttgcatgcgaggaacgggtgagcgtcattggacctaagggtaagttctccatgtctgtgctgggacctgtgagagagcgcacccaggtggaaatttcactgacagatgccaggaccataggggtcagcgcgcccatacgggaatccggcgatgtggagggaagcggcagctgtgtactggaaggccccaggggaacggttattctgaaggaaggggttattgcggcaaaacgccatatacacaccacgccggaggatgccgaaagactgggggtgactgaccgtgaaacagttgcttttgaggtaaatatcaatgaccggtcgttgatttttaaggacatggtggttcgggtcagcgaacactattccacggctgcccatattgacacggatgaggcaaacgcggtggccatgtcgggcacggtctatggaaccatagtaaaactgaggggaaatggattggcggattccggtttgacagattctgatttggcggattcatcaatcgcttaaacgaggagaacatgaggcaaatagaaaaacagacccggacagacggggagaataagatgggggtcatgccggtcaaccgtctgctggtgaccatggcgctgccgattatgatatccatgattatccaggccatgtacaatatagtggacagcctgttcgttgccagaatcagcgaacaggcgctgaccgcggtttcgctggcatattcggtgcagaatcttctgattggagtggcagtggggacaggtgtgggtgtgaattccctgctgtcccggtatctgggggaacaaaaccgggaaggcgtcaacaagacagctgtaaacgggattttcattatgctggttacctatctgttcttcctggtgtttgggttgtttttcaccaggacgtttttcaaattacagacagattcagaagaaatcatagagctgggcgtacagtacctgtccatttgcctgattttttcagtgggcgtgctggagcaggttgtgctggaacggatattgcagggaaccggaaaaacaatttataccatgattacacagggggcgggagctgttattaatataattctcgaccctattctgattttcggattgttgggatttcccagaatgggtatcagcggggcagccatagccactgtgacagggcagctggccggcatggggatgaacgtctattttaacaagcgggtcaaccatgaggtgcagtttgttttccgggggttcaggccggatatgggaatcataaagcagatatacagggtaggaatcccggccattgtaatgcagtccatcgcgtctgtcatgacctttggactgaaccagatactgatttcctacacggccacagccgcggcagtgatgggagtctattttaaaatccagagttttatcttcatgcccgtattcggcctcaataacggcatgatacctattatcggatacaatctgggggcgggaagacctgagcgtatacgaaaggccatccattacagcctgggatatgccacagccatcatggcggcaggctttgtactgtcccaggtttttgcggtggagataatggcaatgtttaatgcctctgagcacatgatgtccattggggtgacggcgctgagggtgattagcttcggctacctgtccgcctctgtttccgttatttacagcgccgtattccaggcgctgggaagagggatggaaagcctggttatctcctttttccggcagctgattgtactgctgccggctgcctgcatactggcagcaatgtttgggctggatgcgctgtggtggtcctttcccatttcggagacaatggcggcattgctggcatgggtatggtggaaacatatccgcaggcagatggcggggcaggtgtaagggtccggaacacaggaattctgtaaaagtgggtttcaaaaacttgcaaaccggtaaattctatggtattataatttggcatgccggattactatatggcttgttgggccgtcgccaagcggtaaggcacaggactttgactcctgcactcgagggttcgaatcccgccggcccagtacatgggaaagtccgcagagacgcaagttacaaggcgtttctgcgggcttttcttctataaataatgtattgcacataatactataatccaatactataatccacatggaggccggaggctgtgggaggaggaaagaagatggagagaaaaagaatcagggattttggcattgtgccgggcgtcatgaaaaccgggcctaaaaataagattacagacgtgcctggcgtgctggtaggccataagacagtgagaaatggggacaacaaaaccggtgtcacggtcattgtgccgggaccgggaaatgtatttgaacgcaagttcatcgctgcgggatatgtgcataatggattcggcaagacctgcggcctggtccaggtggaggaactgggaaccctggagacgcccattgccctgaccaataccctgaacgtggggctggcagccgacgccctggtggagtataccatcaggcagtgcgaagaggaccaggtggaggtcacatccgtaagcccggttgtgggtgagtgcaatgactgcagaattaaccgtatccagcacagggctgtgtccatggaggatgtgatggaggcattttccggtgctggtgaggattttgaggagggtgatgtgggcgctggcacgggaactgtgtgctacggcctgaaggggggaatcggatccgcctccagagttatgagaatcggcggggtaaattacacgctgggggttctggtgcagtccaatttcggggcgacagaggacctggtcatagacggcatccgggccggccaacggattctggaggaaaaggaaaggcgcaggaagatggccaccgcagaacaggaccaggggtccatcatgaccattatcgctacggatctgcctgtcagtgaccgtcagctaaagcgcatcatccgcagggccggtgtgggcattgccaggacaggcgcctacaccggacacggcagcggtgaggtcatgattgggttcaccaccgcaggccgcctgcagggaaaggacagtccggaaatcatgacaagcacctgcatcagggaggatctgattaacgtggccttcaaggcagccgcggaagctgtcaatgaagccatcctgaattccatgacagcagccggacgtaccgggggactggcaggggaggtgtattacagcctgtcggagttccttccgcagattcttaaacattaatggcgaagggacatcagcccctgttctgttatctcgcatcctcccctggtgcggttgatgcggataagtccttcttcggataattctttcagcagcccccgcaggcggccgtcgcttaattccacgccggccactgccagggcattttttatggctccccggccgatgcggggggaggcagctatggcagccagcaccctgaggcggaccggactgtggtcctggtcggactttcgcatctggttcctgatataggagggaagctgtgccagtatcaggggatgggcggcgtagtgggagaagaaataacgggtcaggttgtatagctcctggacattgccgggataatcgtagtccatcatgaagtcaaagagactgggggacaaaaggtcgcgggccataaggcttttattgtggaacagttcacggaagaactggtccatgagcaggggaatgtcctccctgcgtttcctgaggggcagggtgtcgatggaagccgcattcagaaggaaaaacagctcttcccggaaggtaccctgctttaccatcccgtacaggtcctgaccggcggtggcgatgatgcgcacgtcaaagggggagaagcgggttccgaagacatttccggtccggttgtcctgaagaatgtgaatcaggagtccctgaatctcaggagacaggtactcggcgctgtcaatgagcagggttccgtggttggcctctttgaacagtcctaacatctgggagagaggatccgagacagtcagggctgcgcctgacagacaggaggtcccgcccggatcggatagcacgcctgggccgggagcgctgtccgggccggaaacttcatttgggccggagaccccgtttatccttgcggccgcattaagccccatgggcatattcaggcagacaaagggatgctgcctcctggaggatgtcttatgtatggctctggccaggagttttttctgggtgccgctctctccctgaatcagcacagggaagtcatagagggagagccttctggcatattccaggatattcttcatgggatccgaggcagtggtaaagctggtgaacatgctgtccgcatatctggagtcggagaatacagggtcagggagaggcgggtaatccccggtcccgtcagccagcacaggacacggcgtgctgttgagcaggtaaaggggctcatggttgggcagcagcagttcaagggagctgagcaggagatgctttccgctgcggttcatcaccttataatccgcactgtgacagaaatccatgcctttgcagggctggggcagaaactgtgacaggttccggcccgtggtgcctgtctcaggcagctccaggtccatggagaatctgcggttgaccatattgatttccccgcggaccgacagaaggcacaggcctatgggaagattgctgataacggtctggagaagctgcctggaatagatgtagtcctggtaataggcgctggtcagcttggcaatctgcatgatgctgttcacataggatttggtaatctggttggacaggctggcgggaagatgaaagtactcgcacagctcattgacagtggagatgtcaatgatgcggttgccgatatcaatgacattggtgatatggctgggaaccagctggggctcgcccacggtgatggcatagtggatggactcgtcggcctggatgcatccgggataaaagggctcaaaccggtactgcaccacccctgcctccttgagctggtccatgatggtgacaatggagtcataggtatcgtttactatgtagactcgctcaccgggcggtatgcggatgatttggtccagacaggcatggttgaaggtcctggtacagataatctgcatgacctcctttgggatggatatgggaaattctgactggaccagggggctggaaaaaaggatgcactggtatcccttgatttgctccggccgctggacctggtccagcccaattgtatcaaaggcaatatgggctcccaatatcttgtggagatagctctggaattcaaggcgtatgctggaattgatgctgacgatgagcacatggtattttggctggcttctgtccatgttttatcctcctgtgtcttattgggttaattataacaaaaaaattaggatacaacaacctaatgactttaaattttaaattgtaacgaatgctttacggaaaaaagaatgatttatttgacaaggcagcacagaaacgtgtaaaattattgtaagcaaggatgcttacgaaatgagcgtgagagctgtaggtttccaggctttttttgtatcatcataaaaaggaggatattctatgaagaaaagcggaaagaagctgtgcgccctggcactggctgctgccatgctgggattgacggcatgcggttcatcatcaggcaccactgatacgaccacggcagctgcaggcggagcggcagctacagaagaaacgacagcagcggcagctgttgcggagggagagtctgtttcacaggaaacagatattataggagcagtcaatgtggactttaccacactggatccgttagataccagcgacaccctctcaggaggcgttcagcgtcttatcatggacggattgtttgggtttgacgacgaaatgaaaatcattcccatgctggcaacggagtatacggccaatgacagcgccacggagttcaccatcaagctgagagagggaatcacattctctgacggaaccccatggaacgcagaggctgccaaagccaactttgaccgttgggcggacaagtccttaggacttaagagaaccacattgttatgtaatatactggataccactacggttcaggatgattatacaatcgtagtaaaactgtcctcaccctttggcgcgttcattgagacactggcccatccggcctgcgtggtcatgagccccaaggtaatcgagcagggctccacggcatgcgcagaggcccccatcggcacaggacagtatacatttaaagagtggattcagggagaccaccttacggttgagctgaacaaggactggtggggctatgacgctgacatctgcggcggcacggctctggctgacaaggacgccggcttcaagagcatcaccttaaagcctgtacctgagtccgccaccagggttgccatgattcagtccggcgatgcccagcttatctggcctgtaccggatgaaaacctggcaggacttaaatccgatcccaacgtgatcgtgggacaggaccagggcctggtagtccgttacctgatgatgaacaaccagaagaaaccattcaatgacaagaaagtccgtcaggctatcaactatgctatcaataaagaggcatatgtggcagttgtcaagaatggcaactctgagccgggaacctctgtcattgctcccaagcttcagtactacaagggaaatgatccttatccatacgacatcgagaaggcaaaatcactgcttgcagaggcaggctatccggacggctttaagacaaccctgatatttgccaacacttccgccaacatgaagcagggcgagttcttaaagcagcagcttgccgaggtgggtattgatgttgagcttatcagcctggagagcgcaattgtaaacgagaaggtccaggatacggacgctcccggcgcagaggcagaagttgatatgtacatcatcggctggtcatcctctaccggcgacgcggactggggaatccgtcctctgctggcaaaagagtctgagcctcctatgagctacaatatctgctatttcgagaacgaggaattagacggatatctgaaggacggcctgaacacagctgaccgtgataagagagcagaagcatatgccaaggctcaggacctgatttgggaagagagtcctctggtatgtctggcaactgacttcaactcctgggcaacttccaataagatggtaaatgtaaagatgttcccagataactgccttaatatcagaaatggtaagatgacgaaataaaaggcttaagggtctggcggagggggattctctgccagacctttttaagataaaatacagggtgtatacccaataatgatatgagaggtgagagtttatatgctgagatacatatgtaaaagagttgttggagttataccaaccctgattatcgtagttacgtttgtattcttctttgtgcgcctgattcccggagatccggccaggcaggtggcaggaccgcaggcaaccaaagaggacgtggaactggtaagggagcagctgggccttaacaagccccttccccagcagtatatcagctacgtgacaggacttgtaaagggggatttgggcacatcgctgagaaccaagcgcccggtgctgactgaggtccagggccgctacatgaatacggtgcagctcacccttttaagcctgacctggagcgtgattgcaggcgtccttatcggcgtatggtcaggaaggaacagaagcaagtggcaggactatacaggaatgaccgtggctgtctcaggtatatccatgccctccttctggattgggttcatgcttatcatggtttttgcggtcaagtacaggctgctgcccaccaccggggccggctccttcaaaaacctgattctgccgtccatcacgctgggagtcagcattgcggccattattgcccgttttacccgttcctctgtcatcgaggtgctgaaggaggattatgtgcgtacggccagggccaaaggcctgcgggaaaagacggttatctggaagcatgtgttccgtaactgtatgatatccgtggtgacggttgtggggcttcagttcggttttcttctgggcggttccgttgtgacggaaactgtattcgcgtttccgggacttggttcccttctgattgaatccgtaaactacagggattatcccgcaatccagtcgctgattcttatattttccctgcatttcgtactgattaacctggttgtggacgtactgtacgcagtgctgaatccggaaatccaattgagctaaaagggggcgacaaaagatggctaagaataaagtgttaactgaaaagacggacatcaataccccgttttcagagtttgtaagaaagtttaaaaaacagaaaacagccatggttgccatggtatttctggtgtttcttgtggtgctggcatttatcagctataagattgccccttacggcatcaatgaatatgattactctgccattatgcagccgcctacggccgcccatcttttcggcaccgatgagttcggaagggatttgttttccagggtaatctgcggaaccaggatttccctcagcgtgggtctgtttgcagtgaccgtgggaatgcttgtgggaaccattatgggacttttggccggatactacggcggcatcgttgattccatcatcatgcgtatctgcgacgtgctgctggccttcccgggacttatcctggctattgccattgtggccatcctgggaagcggactgtataacgtggtaatcgcggttgcggtattcaatatccccaagtttgcccgtctggtgagaggcaatacactggagacaaagaacagcgtgtttgtacaggccgcccgcaacatcggagccggcgacatgcgcatcctgttcaagcatatcctgcccagcgccattcccaatatcatcgtacagtacaccatgtccatcggaacctccatcatcactgcttccagccttagctttttaggcatgggcgcccagcctcccacacctgagtggggactgcttctgagcaatggacgtaactacatgctgacaagctggcatatcaccctgtttccgggtcttgcaatcttctttaccgtgctctgcttcaatctgctgggcgacggcctgagagacgcgctggatccaaaactgactgattaggagtgggacttatggagaatacgaataataatattttagagattaagaatctgcacacctacttctacacggacagcggtgtgattaaatcagtagatggcgtggatattgaactgagagagggcacaacccttggaatcgtgggagaatcaggcagcggcaagagcgtgaccgccctgtccgtcatgggacttctgatgggaaccacaggaaaggtggcggaaggggaaatcctgtttgaaggccgcgatttgacaaagctggatgatgaggagcgcaggaagatgcgcggggaaaagatttccatgattttccaggaaccaatgaccagcctgaaccctgtcatgaagattggggaccagataacggaatgtatcctgatgcacaataacataagcaagcaggaagcctgggacaaggcagtggagatgctgaagctgacaggcgttcccagggtggagcgcatgatgaaggaatatcccttccagctctccggcggccagcgccagagagtcatgatagccatggcgctggtgtgcaagccgaaaatcctcatagcggatgagcctaccacggcgttggacgttaccatccaggcccagattctggacttgatggagaatctgaagcagaaaacaggaacctccattctgtttatcacccatgaccttggtgtggtggcagaggtttgcgacgacgtggtggtcatgtacagcggccgtgtggtggagaagggcgacgtaaggtccatttttgccagtccgtcccatccgtataccaagggtcttctggcatctattcccaagctgggagagtgcgccgaggagctggaatccataccgggcaatgtccccaatccaaagtacatgccccagggatgtaaattcgctcccagatgttcctgcgcctttgataagtgcagggaggaagaacccggcttctacgacgtgggagaaggccatatgagccgctgctggctctgtgaaaagaaaggcggtgacgcgtgatggcagatatcctgctgaatgttgaaggtatgaaagtgtattatcctgtgaagggggattttggcaaagggcgtgaattcgttaaggcggtggacggcgtttccttcgaggtgcgaaagggcgaggtgttcggcatcgtaggtgaatccgggtgcggcaagtccacattgggaaggggaatctgcaagctggagactcccacggcaggtaagatcgtcctgtccggtgaagatatctcctcctatggcagaaagcagatgcgctccgtgcgcaaaaaggtccagatggtattccaggacccatatgcgtccctgaatcccaggatgtctatatttgacatcatcgcggagccgttaatcatacacggtctgacaaagagcaagaaggaactggaagaccgcgtcatggagcttctgagaaaggttggactggatgattaccatgccaaccgttatccccatgaattttccggcggccagcgccagcgtatcggaatcgccagggccctggcagttgagccggagctgatcatagcggacgagcccgtgtcggccctggacgtgtccatccaggcccaggtgttaaacctgctgcaccagcttcagaaggagtttaatctgacctatatattcgtggcccatgacctgagcgtggtggagcacatcagcgaccgggtgggcgtcatgtatctgggtaactttgtggaggtgggggacaagcgcaagctgtacagcaatccccttcatccttacacccaggcccttctgtcagccgtaccggtaccggatccaacggcaaagaaggaccgcatcatactggagggaagcatcccgtcggcattaaatccgccaagtggctgcaagttccacaccagatgcccccggtgcatggacatctgtaagcaaaaggcgccggagcgctaccaggtatccgacgaccattatgtatactgccatctctatgatgacaaaatcaaggagaacaagggatgaaactctttatcagtgcagatatagaagggtgcgcaggggtggccctggcgtatgagactcataagaatgaagctgcatacggtgaatttgcaaagcagatgacaaaggaagtggtggctgcctgtgaggcagcacatgaggcgggagccgacgagatagtggtaaaggacggccacggggacgcaacgaacattgaccctctctgcatgccggactacgtgaccctgattcggggcaaaagcggtcacccttataacatgatgtccggtctggatgattcctttgacggggtcatgtacataggataccatgccccggcaggaaatcccggatttgccatcagccacacctccacgggcaacagtctgtacatccgtttaaacggcagctgtatgagcgaattcatgctgaacagctacacagctgcttcacacaaggttccggtgctgttcctgtccggggacagcaccatctgcggcctggccggggaaatggtgccggatattaccacggccgtgacaaagaccggtctgggggcatccacttactgcaaggcgccggggcaggtggaggaatccatccgccagggagtgaagaaggcgctggccgggaatctctcccggtgcagtgtggagcttccggagacatttacatatgaagtgacctataaagactggaagaaggcataccagatgtccttttacccgggaatgagggcagtggacacatttaccaacaggctggagacagccagatggatggatgtggtgacggcccattgctttgtggtatattagagcgcgtttgaataaggagataacagcaatggatatagagatgtttggaaagatatcagatgcatttggccccagcgggtttgaggaagaggtggtgcgcaccgtggcgggttactgcggtaagtaccaggtggaaaatgacgccatgaacaacctgtatgtgcgtatgccgggcagggccggggataaaccggtggtgcagctggacgcccatctggacgagtgcggttttatggtgcagtgcatccatgacaacggctgcctgggaatccttatgctggggggctttcacctgaccaacctacccgcccacacggtcatcataaaaacaagggccggcaggaaaatcaggggcatcatcatgtcaaagcccgtgcatttcatgaatgataaggagagggcttccctggagctttgcattgaaaacctgtatgtggacatcggcgccacaaaccgcagggaagtggaggaggactttggcgtatccattggagatcccatggtcccggaggtgtccttttcctatgatgaggaacacgggctctgcttcggcaaggcatttgacaacagggccggctgcgcctgcatcgtggataccatggataaggtatatgacagcaggaatgagctggccgtggatgtggtgggcgcttttgcggcccaggaggaagtgggaatgagaggggccaccgtaaccacccaggtggtgaagccggacctggctatcctgtttgagggttccccttcggatgacttctttttttccgccacccaggcccagggaagaatgaaaaacggcgttcagatccgccgcatggacaagagctatatatccaatccggtgttcatggaatacgccatggagctggccggcaaattcggtatccgctaccaggaggcggtaaggcggggaggcagcaccaatgcgggcaggatcagccttatcggaaaggcggttccggtccttgtgctgggcgtgccttccagatacgtgcattcccattataatttctgtgcaaaggatgacctggaggcagctacggagctggcagcccaggtaatcaaggggctggatggagaacgcatccgccatatcctgcgccaggatatactgtagggaggtggagaaaatggaacgtccggttatcggcattatgggaaatacatatatgacccagccaggcatgtttgacagcatggaaagggcatatcagaacagctattatgtggatgcggtcatgaaaaacgggggtatccctgtgattttaccggcatctgccgttatggagcagacagaggaaatcatgggaatctgcgacggaatcctgttccccggcggggaggatatgactccttcctactatggggaggacccgcatcccgctatccaggtatacaagcctgaaattgacgaagctctgatgagggcgggccgttatgccctggagcacaaaaagcccatgttgggcatctgcaaaggaaaccagctgctcaacgtgctcatgggtggttccctgtatcaggacctttcccttaaagggcctgactgcatcaggcacctgcagcttggaaggcgggattaccttacccaccagatacgggtggaggagggaaccaggctgtcaaaacttttaggcagcggcgtctgcatgaccaattccatgcaccaccagtcggtgaaggagctgggaaaggggctcagggcctcggcatatgcaaatgacgggatcatagaggccatcgaggaccaggaggggctgattgtaggcgtacagtggcatcccgaaagtcttctggagtcagccccggccatgaatcatctgttttcggatctgtgcggcagggccttggagagaaaagcagggagtttataatttctatagaaaaccatcacagaatgctcacattttatcggtatgctggatagaagtggaagctgcccaaagcggcagtctgactgagacagaatgcgggggtccgtgtgatgacaaatgagcagtattatgaattgataaagccctacgaggatgccagccgggtacttagtacccggctggaaatcctcaaccatagtctttacggggacaggtctgacgccggtcccatccataatatccagggccgaataaaggaaaagaagagcatggaatcaaaactggtccggctgggatttacggcgggagtgaccaatgcaaggaaccatctgcaggacatagcggggctgcggattatttgttactttgtggaggatatctataatctgacagcggcgctgaaaaaacagtcggatctggtgataatcaaggaaaaggattatatccgcaatgccaagcccaacggatacaggagctatcacattgtgctgggtataccggtgtattttctggacaccatggaatattttccggtggaggtgcagcttcggaccatggccatggatttctgggccagcatggaacaccgggtatgctacaagaaacaacccagaaaccgggagcggctggaacaggatttctgccgctatgccaggatactggaggagattgaaggggaatttgagacacataatgagaggagagggtcagatggaggttaagcaggcagagacaagaaggacagaggggaagcgggttgagggaaaaaccatattcgccatgtcctcctcagctgttccggtatgcagggcgggcagctatgagacagtcacctttgtcacaaaggattgctttgacaatcagttcacagaggagggagacgtcctggatagcctgaactgggactgcatcaatcctgccaccgggccggtctatgtggaaggcgccatgcccggggatgtgctgaaggtaaagattgaagatatccgggtggcatcctggggcaccatggccgccatacctgacaacggggtcctgggggactgcgtatcccggggaacggtgaagcggattcccgtcagggacggcgtggcctggtttaaccaggacatcggcataccatgtgctcccatgattggagtgattggcgtggctccagagaaaggggagattccctgcggggagccggggagccatggaggaaacatggacaacaccaaaataaaggccggcgccaccctgtacctgccggtgttccatgagggagctcttctggccatgggagatgtccacgcctgcatgggggatggggaaatcatggtgaccgggctggagattccggcagaggtaaccgtgaccctggaggttttaaagggcatttccatagataaccccatgctggaggacggcgaagcctgctataccattgcgtcccatgagaacgtggagactgccgtatatacggcggttaaggccatgacggatattctcatgagggaactgggcatgagcctggaggatgccggtatgcttctctccgccatgggcaatctccagttctgccaggtggtggatccaaaacgcacggtacgtatggagatgaaaaagacagtgcttaagaagttattttgatattggccgcccataccggccttttatatggttttttgatttgggctgcgaaaaggtccgggcgtttactgtccgggcttttttgtttgtaaggaaaattctcctgtgcaggattccctttctgtgtttcattcctgtgtttcattcctgccttctgttttggagggtgtatgaagaacgtgcaattgcagatactacctgatgtatttatggaaagagaagagcaattcatttatatatggaaggatggagcaggatgctgaaaatatggatatgcggggctggaggacgggttggcaggaagatgacagatattctggcgtccaggccggtggagctgcttttgacggatgcggattcggtggatatcacggattcggaggctgtgatggaatacgcccatatcaaccggccccattatattgtaaactgcgccgggctgactgatgcggctgcctgcgaggactgtccggaggaggcataccgggtaaatgccctgggggccaggaatctgagcgttgccgccagaatgggtaagtccaggctggtccagatgtcaacagacgatgtgtttgacggcaggagcctggttccttacacggaatttgacccggtatcacctaggactgtgtacggcaagtccaagatggcaggagaaaattttgtaagggagttctgcaaccgccatattattgtgcgcagttcctggatattcggggacggcagcctttacctggagcgtattctggagatggctggccagggcaagaccatcagggctgcctcggaccagatggcatctcccacaggggctgacggactggccgccaaggtcatagagctgatggagcacggtgaggacggattgtaccatgtaacgggacagggctgctgcagccggtatgagctggcaaaggaggctgtcaggctggcgggctatcaagtcccggtggaacctgtgaacgcctctgaggacaccttaagctccatgaggccttcctacagcgtgctggacaatatgatgctgcgcatatctaatatgcgtctcctgccccattggaaggtgatgctggaggaatacatgaaggagcggcgggcaggaagccgcaggcgggctgagggaaaggacggtatcggctatggaaaataggaaacggccggggcttaccaccgctatctttatcgggcttgcgctgggggccgctgcgggcatccttcttcattatgctgttcctgagggagatatccgggataaactgctgatagacggtttattttatctgattggaaatggatttctgcggctgatgcagatgttagtggtacctttggtattctgttccctggtgtgcggcagtatgtccatgggggatacaaaaaaacttgggaaaataggcataaagacgctgggcttttatctggcaaccactgcactggccatcaccgcagccatactgactgcccatgtcattaacccgggggcaggactggacctttcttccttagagacagcccaggttgaaatcggtgagaaggagggactggcagacacgcttctggccatcattccggtgaatccggtgagggcgctggcagacggggatatgctgtccatcattctctttgcgctgattgtgggaatcattctggccggcctgggggaagcggttcagaccgtggggaatttattcagccaatttaatgatgtgatgatgcagatgacggttatggtcatgaagctggctccttacggcgtgttctgcctgacagccagaacattttccggcattggttttgacgcgttcctgccccttcttaagtatatggcaggagttatgaccgcgctggctatacaggggctggtggtctacatggccatacttaagggttttacagggctgagccctgtcaggttcctgaaaaaattcctgcctgtgatgggctttgcattttccaccgcaacctccaatgccaccattcccatgtccattgataccctgcacaggaagatgggggtgtcccggcgcatttcttcctttaccatacccctgggggccacgatcaacatggacggcacagccattatgcagggcgtggcggtggtgttcgcgtcccaggcatttggaatccacttgtccgtagcagattatctgaccgtgatactgactgccaccctggcttccgtgggaacagccggtgtgccgggggtggggctgattaccctttccatggtatttgcctcagtgggcctgcctgtggaggccatagctctgattatgggaattgaccgtatattggatatgagcaggacggctgtcaatatcaccggggacgcagtgtgcaccactgtggtggcatttcaggacggcgcagtggataaggccgtgtttgatgatatggaagcgggacgggggggatgacggacagcggatgacaggcagcggatgacaggcggcagataacaggcagcggatgacaggcggcagataacaggcagcggatgacaagtaacggataataggtgacagataacactgagaaacttcttgacgtacttccctctggattttatacttgtactatatttagctattggtgccggagcaggaggggaatatgaatatattcggatttgagattaagagcaaggaggagcgggagcaggaggagcgggaatatctgcaccgtatttttccgggaggcacagcccagaaggcggctgtggagcagcagcttaaggaaaagcttccaaaggaagataaaaaggcggttatgctttactatatcctggtgaaggatgcgatgacggctggtcatggcatgagctttgaggaggccgtggggaaggtgtctaaaaagcagcggattcttaagctgacgccggtgatgctggaaaaagtgagagaggtgatggaggacaatcagtaatggggagttggaccagtggctgcaaaagatgggctggatagaacgacggtatgtaattgaaacgttccaaaaacagaccgtcgttttatgcttggcccacattgactgtaaaaaatcagcagaaaggattatctacaacaattgccgacaaggtagcgttgttgactgtgatgccgccctgggtttcaaggctttcaatggttactactacgctgaagttgcagcactcatcatcgcagatatcgcagtcacataccgagaagttaaacgtatcattttctccgacagacgaagccagcctggaaaaggtccatacggggccaattgggaaagcggttggctgatatttacactgtttattaatctggaaattaaaagtaagagacccggctgcggttaagatattacttgtaaattcgaatttgatgcatggtttgtggaatttactcgtatcaatgtttaaatttgccaggttgaatgtggtacctgaagctgtggtcataggaatgttggttgtaacaggtacgctgcatttcataaaagtgcggtttggccttaacacacactttttttcttcgcagcagtatctgggcggttcctggcattctatattttccagattatttctatgttcgaacgtatcgttattatccttattttcaaaattaaaattattttcgaaattacctttatacatattgatcaaataacctccgttataattattcaggctcagcttttgctacagtcaccttaatacataatattcttgattcttattgaatgtgacaagttgtttttttgtataggctgtcatactacaactgaacaagcctgtctattaatttaatagaagaaagcagtccgcagattgtacataaatgaccttttgacggaattctatgaataacaaaaaaccccgcaaggcttacacctgcgaggttttcttcatgcgccagagaagattcgaactcccgacactacggtccgtagccgtatgctctatccagctgagctactgacgcatgctgctgtctgatttgtatctctaacagcgcaagagctattatagcttgtctggatggaaatgtcaatggtttttaaaaaaataattaaaattaattggaaggagagagaaggcaattgaaagaaaacagttggaatggctgaccgcgcagtgctgaccgcatagctgcaacaaatatgtaaccttcttgaaagatgtcgtaatttgtggtattatgttacgagcagaggtaagaaagagcggggaaagtttgattcttatctcttattttgtattaagcggggataaaaatatgaagcagaaattgtcgaagcagaatcttctgcttgttggattcactttattttccatgttttttggtgcgggaaacttgattttcccgccttttcttggcgctcaggcaggggtgatgacctggaaggctatgtcaggttttctgctcagcgcagtgggacttccggttctgggagtagctgcggttgccctctcaggcggcatcggcaagctggcaggcagggtgcaccctgcctttgcatttctgtttacccttcttatctatctctccataggcccgtgcctggccatacccaggacctccagcacttcctttgagatgacggtgttcccggttcttgagcagatgggcgtttccctgaacagtacagttagtgggactggctttacggtccagaccatggcgcagttcgggtattcggtggtgttttttacggctgccatggcagtggcattcaggccggagaagctgacggacagactgggaaagatactgtgtcccaccttgctggtgcttatcagcgttatttttatcggatgcctggtgtggcccatggggcattacggagatccggggtctgtctataagtcaggcccggctgtggcaggtttcctggaaggatatcagaccatggataccattgcggccctgaattttggaattatcattgctatcaatattcaggccaagggagtggagcaggagggtgcgatcgtcagggaaaccatcaaggcgggaattatagcaggcattttgctggcccttatttatgcggccctggcccacatcggtgcgcctgcgggagctgcggcccgcggcatggacaatggggcaaggatactcacctacgttgcgggaaacctatttggaaatgccggtatgatgatactggggcttattttcctgattgcctgctttaatacatgtgttgggcttctcagctgctgcagccagtatttcaattctatcatacctgtaatcggctacagagtctgggtgtttttgtttgccctgatcagtctgattatatccagtgcaggccttaataagatactggccgtgtcagtgccggttttaaatgccatatatccgattgccattgtgctgattgtactggcgtttgtagggccgctgacaaagaggtggccggccatgtatcccgctgctatcctgtttacaggcgcggtcagtgtggtatatgctctggaacagagtaaatgcgtgattcccttcctcacacaggcaactacgttcctgcctggatacggggcgggattggggtggattgttccggcatttgcggggatggcggccggtatcatttactcctcggtcatgggggaccaggaagaatagacaaggacaggacaagacaaggacaggacaaaagaatgacagaagcaagatggatgttatacgccaagaaggcagattttgatagaattgcggaacaataccatatcagcccggttacggccagaatcatacgcaaccgcggtctggaggatatggaggatataggacggtatctctacggctctgtggagcagcttcacgatccccgcctgctgccggacatggaccgggcagtggagatactgggagagaaggcggctgaaggcaggcgtatacggattgtgggggactacgatatagacggtgtgtgctccacgtatctgctctaccgtgcgttaaagaggattggcgctgaggtggattatgagattccggaccgtattaaggacggatatggcatcaatgagttgattatagaggcagcggcagaggacggcattgacaccatccttacctgcgacaatggtattgccgccatcagccagatagcaagggcgaaggagctgggcatgaccgtggtcgtgacggaccatcacgacatactgactgaggccggggagacgccggagggcagggagatactgccgcctgcggatgctgtggtcaatcccaagcgcagggacagcctgtatccgtttcctgatatatgcggaggcatggtggcctataagctggtgcaggtgctctatgaggtccataaggttccacgggaggaatggctcagcctgctggaaatcgcagccattgcaacggtgggggatgtgatgaagcttcagggagagaaccgcatccttgtaaaggaagggctttccagactgggacatacgtctaatctgggacttcggaaactgatagagaaaaataatcttcaggccggaaccatcacagcctatcatatcggctttgttattgggccttgcctcaatgccagcggacggctccagacagccaagatagcccttgggctccttctgtgtgaggatgagggtgaggcggacaggatggcagaggaattaaaggctctcaatgaccagcgcaaggacatgacccaggaggggattgaacaggcggcagccatggtggatgagctgtaccgggaggataaggtgctggtggtgtttctgccggactgccacgaatccctggccggcattgtggcgggacgtctcagggagcggtacaataagccctcctatgtgcttacacgggctgagggctgcgtcaaggggtcgggacgttccatagaggcatatcatatgttccagtccctggtggaggtgcaggaccttctgctgaagtttgggggccatcccatggcggccggattttctctggaggaaaaggatgtggacgaattccggcgccgtctcaatgaaaatgcacgggagcgcctgaccgaagaagatttcatacccaaggtgtggatcgatgtggccatgccatttgaatacataacagagccgttcatagaggaattggagctgctggaaccatatggacagggaaatgagaagccccagtttgcccagaagggactgtttatacgcagcgccagagttatggggcgcaacaggaacgtggtgcgcataagccttgtaaatgacaggggaacagccatggacggcgtgatttttacggatggggatttgttcatggaggaaaagggtgattgccgtgttatggatattatctactatccgggtataaatgagtataacggaaacaggaatctgcagattgtggtaaagaattggaagtttcattagaaatcggaagtcggaagtttcgttagaaagtttttacagaagcttcattgctccggaataaaaagagggtgctgccgcagcggacagcaccctttttggcaaagaagattagttctgagcagcctcagttgtctcctctgcaacctcagcattagcctcgctggcagcctcttccttggaagcctcggtagactcctcagcgtcagcagcctcggtagattcctcagcgtcagcagcctcagtggactcctcagcgtcagcagcctcggtggactcctcagcatcagcagcctcggtggtctcctcagcgtcagcagcctcagcagtggtctcctcaacagactcagaagcctctactgtggtctctacggcagtagtggactcggtcttgttgtcgctgccgccgcaagcggtcaggcttcctgcgatcatagctgctgccataatagctgtcatggattttgcgattgtcttcttcataatagttttcctcctctgaaagcctcccagtgagactttctaaacacaaatttttatggaacgagtttgataatatcctataattgtgtccgaattgtgtctaaagtttaaagaaagtactacaattattatgaaattcttaagaaaaacagtgataaaaaattaacagataaagagaaagcagctctgccatatgtcttgcaatttactattatataggttataatcagcagaaaaaggctgtcattgcgaaaggaagaggtaagataatggttaatgaagtaatggattttattaccggatatgacaaggaagtgggcgaggccattcaggcggaatgcgcgcgccagagacgcaacctggaactaatcgcatcagagaatatcgtgtctgagcctgtcatgatggctatggggacagttcttaccaataagtatgcggaaggatattcgggaaaacgttattacggaggatgccagtgcgtggatgtggtggaaacacttgccattgagcgggctaagaagctgtttggctgtgattatgccaatgtgcagcctcattcaggagcccaggccaatatggcggtgtttgttgccatgctgaaagcaggggacacggtcatgggcatgaacctggaccatggcggccacctgacccacggaagccctgtgaatttttccggtctttactttaatatcgtaccttatggagtcaatgaccaggggttcatcgactacgatgagctggagcggattgcaaaggaagccaggccaaagcttatcatagcaggggccagcgcctatgcccggaccattgatttcaagcggtttcgtgaaatcgctgacgaagttggcgcttatctcatggttgatatggcccatatcgccggcctggtggcagcgggcgaacaccccagtcccattccttatgcagatgtggtgaccaccaccacccacaagacattgagaggcccaaggggcggtatgattctggcaaataaggaggcggctgagaaatttaatttcaataaggccattttcccgggaacccagggcggtccgctggagcatgtgattgcgggaaaggcagtgtgcttcggagaggcattaaagcctgaattcaaggcataccagcaccaggtggcagccaatgcaaaggctcttgcccaggcccttaaagatgagggattcaagctccttacggacggcacggacaaccatctgatgctggttgacctgcgcggcatggaggtgtcgggcaaggaactgcagaaccgctgtgatgaggtttatatcaccctgaacaagaacacggttcccaatgaccccagaagcccctttgtcacttcaggcgtgcgcatcgggacaccggccattaccaccaggggccttaaggaagaggacatgcccaagattgcccggtgcatttggctggctgccacggattttgagaataaagcggattatatcaggagcgaagtgacaaagctctgtgagagataccccatttatcagtaaatccgggaaaatgtaataaacagaagcaagagggaacaggaatgaatatgggggagctgcggctctgggggtgtccccggcgcctcagcccccttttggcatatagccggctgcggcgcaggcaggatagaggcgcaggctgaatagaggcaggtggaatggatggaactgacaggtcaggcgctgaggctttcgcggcagggagcccaggccattgtggaggaagtgggggccattgtgggccagcatatcaatatgatggacccggaaggctatgtcatagccagtacggacccggagcgtatcggtacgctgcatgagggggccaggaaaatcatcagggagcatctggatgagctgtatgtgagggatgaggaagcgacgcttacctcacgcccggggctgaacctgcctgtgtaccaggctggaagtattgccggcgtaatcggtattacgggacggtatgaagatgtggctggctatggccagattgtgaagaagatggtggaaatactgattcgcgaaaatgcggaacaggatgaacgccgtatgggacagcgggtgctgaaccggtttctggaggactgggtccttggaagcggactccttcagcccagaatactggaggagagaggctttgcgctgggaatcgacatttcggttcccagaagggtcatggtgtccggcgtcaggaacttccaggaatatgcatccactgcttcgggccagaaactgctggagcaggcagaaggggaagctgcttctttagcaggagcgggatgtctggtgtttcgtaatgccggccggcagatttttctggttcagggtgcgtccgaccgccatatggaacagctggccggccgcatccgctcctgcgtgaaaaagaaattcggcatagggctggtcatgggaatcggcggcagggccagggacatccatgtggcatatggacaggccaacaaggcatggcgctctgccagcatgtctaaacgggacgtcatgacgtatgacagcgttaccctggagctgtttacggaggatgtggctgaaagcgtgaaggcggagtacctgcgcaaggtctttaagaactgcggttatgaggagctttgtcagtggatgggattgctggaggcatatttcagtgcggaaggttctctgaaggctgcctcggatgccatgcacatccataaaaatacattgacctataagctcaggaagctggaggagctgacgggatatgacgtgcgtgtactgagccagtcggcagtgttttacatggctatggtgtttttccgggatgtgaaggaaatgatgcaggattaggcggatgtgcgggcagcagaacgggccgcgtcctgccgtgaagtttgttgtgctgaggaataaataatgtgcggaatatgtgttttgtggaacattgacgcaggggcctggaaacagtacaatagacttaagaaattcaatcacatttgggaggcggaaccatgaaatttttatttgcatcagattcatttaaggggaccctgtcgtcagagcgcatcacacagcttctggaggcggcagcggagcagacatttcctggctgtgagacagctggcgtgcctgtggctgacggcggggagggaaccattgacgcggtgatttcggcgctgaacggcacataccgcagactgacggtccatggacctctgatggaggaggcacagtctttttacggggaatttgaaggggactccgccatcattgagatggcagctgcttccgggcttcccatggtgccggcggacaggcgcaatcctctgaacaccaccacctatggcacaggagaattgataaaggatgccctggaccggggataccggaagatttcaatagccattggaggcagcgctaccaatgacggaggtatgggggccatgcgtgctctgggtgtaagatttctggatgaccagggaaatgagctggagggcagaggccgggatttaaccagggtggctgatattgacgtgagccggattcaccctgcggtgtcacagtcccggttcactgtcatgtgcgatgtgaccaatccccttacaggaccggatggagcgacctatacatttggaaagcagaagggcggcacaccggaaattctggatgtgttagagggcggaatgattcgttatgcggccctgttgaaggaaaagctgggcgtggatgtggataagattcccggagcaggagctgccggtggattaggggcggcattctgcgtgttcctgaaggccaatcttaaatcaggtattgacacggtgctggatttggttcattttgacagcctcctggagggggtggacctggtaattaccggagagggaagaatggactggcagtctgcttttggaaaggtgcccagcggaatcggaaagcgctgcagggagagaggcatcccggtggcagcgattgtgggaggtatgggcgacaaggctgagacgatatttgattacggcattgacagtattataaccacgataaatggcgccatggatatcgaggaggcccttaagcgggctgaagagctgtatatcagtgccgcggaccgtacattcaggatgctgaaggccggaatgagcctgggccggaaataggccgggaagaaaagtgtaaatggcgtgaaattggctgaagcaggcatggctttgtgctgctgtccgggatggattcattatcatatggattcatttcgggcagcatttttatattattaatgttatttatgcccgagtaatttatacgcatgccattgacttgaccggcggtaagtgctattttacatatataaatcttgcgggcgttctgtccgagatattcgtaagggagtttctcccctgtatccctgtgttgtgtggttgaatgtttttaaaatgtcaggcggtggttctatggatatgtgattcaggataggtgattcgtgtatattcttgcaacggaggcaaagcttttgtataataaaaggagaattggatgaagaaaaagaaagaccctggcgggcctgtcatgaagccgctggcagagctgaccctgctggaccgttttttatttgcatgtgttatggaggaccgcgggaccatggaactgtgccggagggagtaagcggggagctgatagagctgcttcattacatagaacacacctctgaaacagaggcggccggaagcagcagtccgaggattaaggaactgcaccggcgggtcagccaggttaaagtcagtgaagagattggagtgagatatatgcaggaatgggaagaacggatgtatcagtatcaggatgctaaggcggaaggaagggaaaacagagggacagatattggataaactggtgcggatgttctctctgagccgggacacggccggagagtatctgaagcgctataaggggactccctgagccgtatatccgggcggcggccctttttcatcccgtcttatagtgaagtgtattatgacggaaagcgcagtttttgtgacagcaaagtatcacttgaaactgcgcttttgaaattgtgtatccaatacggtgcattcaatattgtacattcagtactgcacattcaatactgtacatctaaaactgcagtcaatacattctgtatatccgggccgtctctaaggctgtctgtacaccactccgcccttcatcaccagtcctacctgtgaaagacgggacacatcctccagcgggtttccctccacggcaatgatatctgcttccataccgttttccagctttccgattctgtcttccaggcggcagaccctggccgcgcgggaggtgacgccctggatggcggttacagggtcggctcccagctccacggcatatcccacctcccggtacagaaagccgtgataagcatctgttcccaggacaaaggggagacgggccttgatgatgcgggccacattttcgcggacccggctgcggttcagcctaaccttcagggcattggcgggcgagaggaattcctcccggctggggtctaagaaaatgccggaggtcaggtccaccacacagcgggaagcggccagacgctccacgtcctgttccgaagccatatacatgtgctcaatcacatccaccccgccgtcaatgcagtctttcaggccctggccgccaatacagtgggcagcagtggggatgcccaggcgagcgccttcgctgaccgcagcggagatttcttccaggctgaggaagctgggcacaaaggtgctggcgggatccggaacaccaggggttatgaagagtttcagcaggtctgcgccttttttcaggttctcgcggcaggtatggcggatttctccggctccgcagtggggcattccgatgtggcctgctccgtggcttcccttcatgccgatgcctgcggccaggagacgggggccgtccacttttttgtcctcaatcagcttcttcagggtcacgtctatatagaatttatcccccatgcaccgggctgtggttacaccgctcatcaggtcttccttaagtccctttaatgccagcagggtcagctggcattcgttgctccaggccagcagctccagatgttccggaagggctgcatcaatgcacaggtggttgtggcactctatcatgcccggcatcagggtcatgtgcggaaggctgatttcttttgcatcttccaagtacaaggcctccctggctttccggggcaggatttcccggattatcccgtcttcgatgataagggagccgttctccaaaggagtaagctgttccccgcacaaaatcattcctgcatttaatatggttcgcttcatgtctgtctgtttcctccgtctgtcaatatcatttgtccggtttagtctaaatcagcagttgccgctggctgggtttcgcagccctcctgttcagggacaggaatgtctgcagctatgccgtgagcttcattccatttgcgggataccttggacagccaggataccagcagcgggcagagcacggctgtgattaccacggcggcagctgtctgggcagtggctgtttccacctgaggctggaaggaaggatcggccatggctacggcagtgggcgtggtggtggccaccccggccgtggttccgatggcagcgcccatgggatccgcctttctgcggagggcgctgtagaggaaaaaggtgagaagtccggtggccagcacggtaagaaggcccagcacaataccggaaatacccgctctcaggatattgttgaagttcatgccggcacccagggcaaagccgttaaagggcgggagaagaatcatgccggtggccagaatttttctccactcatggtccagattgccgatgatgaacccgataaccatggggatgatgctggcaatgatatctgttatggggaagttgcccatgccggaggcgcccaatgcaatcatggtaaaaaagggcccgtcattgagggcaaggatagaggtggctcccacatctgtttcatcaccaaattcgcctgccagggtggcatagatgacgccgttggaattggttacggctccgatgacagccaggggcgccagtcccaggaaccctgcttcgccgaacagtgcattgagcagaagccccaggccgaaaccgataaagaacttaagggcggtgaggacaacgcctttccataccgtgctgccggccatctttacatcaatggtggcgccgctgcagaacagaaacaggccaatcagggtggggaccccgttcttgaacaggcctgaggtaaaacctccgatggtgagggcgttggggaaaaaggtattcattgcacatccaaggagcaggggaatcaccatcactcctgccggaaaacgcttcattgtcgctaatatcctcataaatctcttctcctttacgtgggcttccatgctcaccggccatgtgagatgcgtcagccgctggttgattttacatgccattgcaatgctgctgactgattaaaaaagcaattgtcgtgccaaaaaactatttgagggtgaaacagattcaaattttatttaaaacagctaaagttgcatgagaaaatatgtgctatttacacaataaaaaaggaaaaataaataaaaagttggaatatataaaattgcataaagattgctatttagcaataaaatgcaatttaatgattgcgaaaatacaatatataggataatatggacaatgggaggtggaagagtgtgattaaaattgtattttttgcaccatatccggacattcttcctgtcattgagcaggtgttccgggaacggcctgaatcggaagccattcagtatgaggttgtccaggatttctacaataacagactggaacaggtggaggcggacgtggttatagccaggggctttacggcccataccttaaagcgcaaaaacattccgtgtgcagagcttaaatccacgggatacgatgtgatgaaggcagtcaatgaatgtatgcagaaggggaatattgaaaggattgccgtggtgggcgccttcaatatggtgtatggggcggagcagatgtgccacctgtatccgaacctggggctgggctgctatgcggaggacgatgagaccaagctggagatggcggtgcaccaggctatgaaggacgggaaccaggccattgtggggggatattccacggtccagatcgcggagcgtctgggtatgccggctgccatgattcattcaggaatcgaggcggtaaaccatgccatttcagaggccatagcggtggcccatctcacccggtatgagaggcagaaaagggatgagatagcaaatatcatgaactactccttccaggggattatttccgtcaacaggaagggaatcataaccctggccaatacatgctgccatacgtatatgaaggacagaaagacttcgctggcaggagagcatataaaggacttctttccggatattgattttgacagtgtgatcagggacaaacaaaagatcctgtcggaggtgtgcaggttcggaggaaaacaggtgctggtcaattgtgtgcctgtggccggtgactcggaggagttcggctgcgtgctcaccttccagggaacggaacagatacaggcagaggagggcaaactgcgcaagcgtatgcattcggacggctttacggccaggtacgacttttcccacatactttacagggacagctgcatggaggcggttatcagccaggccgtgaaattcagctattcggattccaatatactgattcatggggagacgggaacgggaaaggagctgtttgcccagagcattcacaactccagccgcagaaggaaggggcctttcgtggcgattaactgcgcggcattgccggagaacctgctggagagcgagctctttggctatgtggaaggggcctttaccggagcgtccaggggcgggaaaatgggattttttgagattgcccacaaggggaccatttttttggatgagataggcgatatatcaccaaagctgcagagccgcctcctgagggtcatacaggaaagggaaatcatccggctgggtaatgacaccgtgattcccattgatgtccgcgttatctgcgccaccaacagggatttaaagaaggaggtgtcccgggggaatttcagggaggatctgctgtatcgcctggatgtgcttgaactcaatcttccgcccctcagaaaacggaagcaggacatcctttatctggcggaccggatggtgcggtttgaacatgagcgcacagggagcaggctggaggcaataacccaggagggcagggaacttctgatgcgttacaactggccggggaatgtgagggaaatgcgcaatttctgtgagcgtatctgtattctctgcgagaaaacaagggcaggggcagaggacgtactccaggcccttccgggagagtgggagcacggggagggggcagacagccagtatgcagacagccagtatgcagagagccggcatgcagaaagccggtatgcagaaagccggtatgcagaaagccggtatgcagaaagccggcatgcagacagcggttccggcagcgcggattttccggcgtccggcagtcatgtaccggcggaggccgcgggccgcgggccccgtctggaggaagcccagaggcaggccgtgaaggacgccctagagctgtgcggttatcacaggggcaggacagccgcatatctgggaattgataagagtactctgtggagaaaaatgaaaaaatacggcattgagggttagacggctgacaagaaacaccgggcacaggggttgcgctgaaacgg

SEQ ID NO: 3138 - DNA, 102556 bp, Unknown
  gut microbiota DNA sequence
tcttaacataaaaaaagcagaaaaagaattggatatattaaacaaaaaaatattaaaaaactatacgaatcagacaattgacatacgatataaatagtgctactatggaaacacaaagaaaaacgatgcatgtttgcttaaaatgaactaaatgtaattacttacaaatggcagatatgcataatttttaaaataatgatgcaaacctttgcaaacatacatgcgaaggcgatgaaaagagagggagagaaatgatgaagaaaaacctgaaaaaagcagtgtccctggccctggcatctgtaatggcattttcactgacagcctgctcaggcggcagcgggaccaccacggcagcgcaggcagacggcaaggaagccgggagcggcaccggggacgtgaccatcaagttctgctggtggggcggtgactccagacatgaggcaactgagaaggcggtggacgcatttatggcaaagtaccctaatattaaggtggaatgcgagtacggcgcctggaccggatgggaagagaagcagtctcttgccattcagggaggcaatgcggccgacgtcatgcagattaactggaactggattacatcctacagcggcaacgggaccaactttgcaaatctggaggattacagcgatgtcctggacctgacccagttttcccaggacagcctggaccagtgcaaggcagacggcaagctgatggcggttccggttgccctgacaggacgtctgttctactggaataagactacctttgatgaggttggatgtgagattcctacggatgaagcttcccttctggaggcgggggccaagtttaaggcttacaatgaagattattaccctctggctatgatggaatacgacagggccatcttcctggtatactatctggagagtgtatacggcaaaccgtgggttgagaacggtgagcttcagtacacagcccaggagattcaggcaggcatggacttcatgacaaagctggaggaggcccatgtgattcctaccattgccacgcttcagggtgatatggccgattccttagataagaacgcaaaagtaatcgacggcaaatacgctggcgtatttgagtgggactccgcagtttccaaggtccagaaggcaatcgcggagagtaccacaaagccgggccaggagctggttatcggggacttccttaaatttggtgattacgacggcggctttaccaagatttccatggcgctggcagtatccgcaaattcagcgcatccaaaggaagcagccatgctggttaattacttattaaatgatgatgaggcaattgaaatctgcggcactgagcgcggcattccatgctccgcagagggcgtaaagattctggaggaaaagggaatcggtgataagctggttatggaggccaatgcaaaggttctggcctactccaaattccctctggaccccatgtttgagcataatgacctgaaggccaatccggacggtgtatattataaggtatttggaaagctgagcgcaggcgacatcacctccgccgaagcagcagaggatttgatgaagggtattgacgactgctataatttctgattttcagatgggattcaggacagttattggtttttagatggcaggaaatagaatggatgttaggaaagcagtaaagcacagggaaaattacgacagcattgttacatattttaagactttgaaaacgcccggcatggaccagatggtcctgctgatagataccatagaacagatgtccccggaaatatacgagcattacagggcgcttcaggacatattccgcatgagattaaaggaaatgctggcaggagggaatccgggcccgcaggagcagcttgcatacatgatccaaaaggggtgcagcacaggtacgctgctcagggagaagtatgagcgctatttagattaacaggtttggaggtaaccgtatgaaaaaaaagaaaggattctgggcgttgaatatcggcctgctttacattctgccatggctggttggatttcttctgttcaaggtatatccatttgcatcttcgctgtactacagctttaccaactatgatttgttcaacggaataacaaagaccggacttctgaactacgagaagatatttacggatgaggatatcatcagggcatttgtggtgacattcaaatacgcaatatttgacgtgcccttaaagctggcgtttgccctctttatcgcatatattctcaacttcaagctgaagggcgtgaactttttcaggacagcatattatatcccgtccatcctgggcggttccatcgccattgccattctctggagggctgtgttcaatacggacggactgattaacacggtaatcacgttctttggaggaccaaagattaactggatggccggcgctaacagcgcattgtttgtgattgtgcttttacgcgtctggcagtttggttccgccatggtcattttcctggcagccttaaagggcgtgtcagaagatttgtatgaggctgcctccattgacggcgcaggcaagtggacccagttttttaagattacagtaccccttatcacaccggttattttctataacctgattacacagctctgccaggcattccaggagttcaatgccccgttcctggtgacaaagggcgggccaaacggcgcaaccaccctgatttccatgctgatttacaacaatgcgttcctgcgccataagatgggaatggccagcgcgcaagcctggatcctgttcctgattgtcatgacgctgaccgcggtggcgttcatcagccagaaaaaatgggtatattattcagacgaggaagggaggtaggaacatatgacaagagagacaaaacggaaagtcagcacggcaatccgctacaccctgctgattctggtgggatttatcatggtataccctcttatctggatggttggggccacatttaagaccaattccgagatatttaccagtgcatggttcctgcctaaaaaccctgtgttcgacgggtacagcaatgcctttaaaagctatggaggcaagatatccctgattacctccctgattaatacatataaaattgtgattcccaaggtgattttcaccgtggtgtccgccactatcgccgcctatgggttcgggcggtttgactttaagggaaagaagattttctttgcgctgctgatgtccaccctgtttcttccccaggtggttctcaatgcgccccagtacattatgtttaacaagtggaaatgggtgaacacataccttcctctgatcgtaccctccctgtttgcagcagatacctactttgtattcatgctgatccagttcctcaggggagtgcccaaggagctggaggaagctgccaagattgacggctgcaatacattaaaaacgctgtggtacgtaattgtccccatgctgaagccgtctctggtgtcctgcgccctgtttcagttcatgtggaccaacaacgatttccagggcccgttgatttatattgctgatatgcagaaatatacgaactccgtatacctgcgcatgtccatggacggagatgttggcttccagtggaaccgtatcctggccatgtccctgatttccattgtaccgtcgctgattgtgttcttctgtgcacaggattctttcattgatggtattgcggcaggcggcgttaagggttaaaatagaaaacggccagggttggcctggatggaaatgggggctctcctgggaggggccccattcctggtttgacagcagctacagagagacagaacagaaaagaggtataaggcaatggatttaaaggtgatttataaaaacgcgcgctgcgccgtactggagatagaggacggcggtacatatgagaccagccggatgtaccgcctctatctgaacgggaagtttatccgggaaacgggaaatgctgtcacaagcatttatgatctgaaacctgataccagctatcaggtggagtgcagaagtggggagggatttgtgcttaagtcctcctttaccacggacagcgaattcgtcacattggatgtgcgcgatttcggggcaaagggggacgggattcaggatgacactctgtttatccaggctgccattatggcctgccctgaaaagagccgggtcctgattccggccgggacctaccgcattgtctccctgtttttaaaggatgatgtgaacattgagctggctgagggggcggtgctgtccgcgtatacggaccggacccgttttcctgtgttccagggaatgatccagagctatgacgagcagggcgaatacaatctgggcacatgggagggcaatcctcttcccatgtttaccggcatcataaacggcgtgaacgtgaaaggcgctgttatctatgggcagggaaccatagacgggaacgcgggagacagtgagggaaactggtggcatgagcccaaggtaatacacacggcctgccgccccaggatgattttcctggagcggtgccggcaggtgacggttcagggaatcacggtgaggaacagccccagctggaatatccatccctatttctccgaccacctaaggttctttgaccttaaggtgctgaatcccaaggattcgccaaataccgacggactggacccggaatcctgtcaggatgtggagattgccggtgtctatttctcactgggagatgactgtattgccgtaaagtcgggaaaaatctatatgggctccacctataaacggccgtcaaaagacatatccatccgcagatgctgtatgagggacggccatggctctgttaccatcggaagtgagatggcgggcggggtaaaaaacctgaccgttaaggactgcatgttcctgcacacggacaggggactgcgcatcaagacgcgcaggggccggggaaaggatgccgtggtggacgggattgtctttgaacacatccgcatggaccatgtgatgactccttttgttatcaactgtttctatttctgtgatccggacggccacagcgaatatgtgcgcacaaaggaggcgcttctggtggatgaaagaacacctttgattaagagcctgtgctttaaggatatagaggcagaaaactgccatgtggcggctgcctacatgtatggtcttccggaacagcggattgaacgggtggagatggatcatgtccgtgtcacctatgcggcgtctgccagggaaggacagcccgccatgatggatggctgcagctcccatatatgccgcatgggaatctacgccaaccagattgaggagctgattcttacggatgtaaaggtggagggacaggatggtccagccatcatcacggaaaatatcggccgtgtctgcggaagcatttgacagaagccggaaaacgagttagattgtattcgtacgcccgaacgggaatgatgcaaatgcttataggggacagcaaagagggggatattatggcagtgacgataaaggatatcgcgaaaagggcgggggtttcctattccacggtatccagggccttaaacggcataggggctgagaatacggagagcaggaagaacatactgcgcctggctcaggagatggggtatgtgcccaaccaggcagccatcaacctgaaaaaatccagatcctatgtaattgggctgtacttctctaccatcagtaagatgacatcgccgtttgtgctccacgacgtgctgacaggggtttacagtgttgcgggaagcaagtataatgtagtggttaaaggtattgatatgcatgagcccggaacactgaatcccagctattttgacggaatcatcgtattgtcccagcgaagcgaggacatggagtttatgaacgaagtcctggacaaaaagattcccatgtcagtcatctgccgtgccgtggacgtggacgcgcccaatgtgaccacggatgaggcccttgccatggaacgggccatggactatctgctggagaacggacaccggaacatcggcatcatagaaggaaatccggggctggattccagccggctgcgccgcaggggatggaggacgtccatgaccagccacggactggatccggatgcccttcctgttatcagcggcaattaccggtatgccagcggatacaccgcggcaaaacagcttctcaccttccggcccacggccctgctgtgttttaacgatgagatggcttttggcgccaggacagccattgtggaggccggccttaaggtgccggatgatgtttcccttgtgggttttgacaactgggatatgtcaggctattcggacatgcatttgaccacagtggaacgcaacatgggggagattgccagggagggagccagggtgctgcttcggcgcctggacgagggaatcgtggacaaccggaggatttacctgaacaataagctgataatcagggatacggttaagaatctgaatgtggaagagaggaaaccatcatgaaaaagttagaagagtatgtaagaagcataccggattttccggagcctggaatcatattccgggatgtgaccagcatcctgcaggacgcagacgggcttcacatggcagtggacagcctgattgacatggtcaaggacctggattacgacctggtaataggccccgaatcaaggggattcatctttggagtgccggtggcctatgcgcagcacaagggatttgtgcctgtgcgcaaaaagggaaagcttccctgtgagaccatttccatggaatatgacctggagtacggacaggcaaccattgaaatgcacaaggacgccatccgtccgggccagaaggtaatcattgtggacgacctgatcgccacaggaggaaccactgaggcaattgtcaagctgattgagcacttgggcggacaggtggtaaagatatgctttgtcatggagctggcaggactgaagggacgggagcatctgaagggatatgatgtggattccgcgattatttatgaaggcaagtaggaaaatgaaatagatttggttacagaaagggcccattagattgaaaaatgggcctttttgttatatctgtgcatcaaacgaaccccaaaattcatctgatatttccttgaacaaaccccttccccgtagtacaatattaataattatctaaacagaccaataaatttcagaaagacagaggattacgggcatgagaagattacggatggcgtcaataacggctctttgcatcggagcggcagtcttggcgggcggctgtgccggggaaaacaaaaaagctgaaatcccccaggcggaggaatcttctgccctgacagaggaaaatgacagcgacactgccatgaccatagagttctggcactattataatgatgcccagaagcagcatttggaccagcttgtaaaggagtacaatggtacgctgggcctggaacgcggcgtggccgtggaggcttacagccagggctctatcgccgacctgaccaataagatagacttggtgctcaacggcaccaccaatgatgtggagatggcaaatattgtgcttgcctacagggacatggtggtcaacacggtaaagctgcatcccgacagactggtggagctgggcagtgtggtgccggaggcagatctggcacagtataatcgggcataccttaacgagggttatatcgacggaaagctttacatactgccggtggcaaaatccacggagcttcttctcatgaaccagaccaggctggatgaatttttggacgccaatccccaataccgggaggagaacatggagtcgtgggaagggctggaacggatggctgagggatattttgagtggacggacagcatgactcccggtacggacggggatgggagacctttcattggagtagataacctggccaactattttgtggctatgaatcatgctatgggttcggacatctaccattacgatgagagcggcaccatggtgccggatttggataagggtattatcgaaaggctgttcctgaattattatgagccttttacaaaggggtattacggggcaaagggccgttaccgcagtgatgatgtaaagcagtcctatctggcaggctgcatcggatccagcagcagcgtcctgtattttccggaagaagtggctgattcccagggaaatatggtaccggttacaacaggtgtctaccaatacccggtgatggaggggaccaccccgacggcaatccagcagggggccggagtggcggtgtttaaccgcagtgatgaggaaaacagggctgccctggatttcatacactggctgaccattgacaaaggctttgaacttgccacctccatgtcctatatgcctgtggacaataacggcatgacagaggagcaggaacagcagattgatgacgccagggtgctgaaagggattgagaccggacttaagcagagcaattcataccagatggtgtatgggtttgactttgagaactcatatgatgtcaggacaggggtggacgcgtgctttagcgaggcgctgagccagggacgtatggagtttgaggagtatctggccagggggatgtccatggatgaggcggcagcttccatggactacggcagtaaggcagaggcgttttatgaacaggtaaagaccatttttgaagaatagtgtctgacagtgcctctgtctggggaatggaggatatcccatgaagaaacgtttgctgagcaacagggtgaggaacgccatattaatggccatcctgctgcagagcgttatatttggctttggactgatggtgaccggaaccttctcgggaacagccaaccgcccttataaggtgatggaatcccaggtagcggaaaaggactcacttatatcaggatatatgaataactcccttctcatcgccaataccatggagaaagagctggcaaagataaaggatgacaggaagatacatgacagactgattgacaatttaaaccacgcatcatcggtggacggcgtcttttatctggatttggaccagaaggaggctgttatataccgggacggggagccgcagatattttcgtctgcctatggtgatatctactgtgtggtgggaagctctaagagcgaatatcccattgccctctccaaggattggagtcccaagctgacgccgcaggaatgggcaaaggcggaactgttttggacagaaaggacaaaggggggaaaatggttctttgatgataaccgtctgtattatgtcataagccaggaggtctatggaagccgccggatgatggggttccaaatcagcggggaagtgctggactcgtatctgggcctggataatcctccgtacaagggaatgcaggtacttctcatgacggatgaaaagattctttacagccgggataaggcgttcataggaacggattatgactacagggaagatggcggcaggatttcattaacgtataatggagcttcctacgacggtgtgcgcagcatcctgcaggtttatggacatatggaaggcggttccgtgtatgtgggggcggtgtgctaccactcagagctggcagaactgtccaggtccaccattgttatggtggcgggggtctatctgctgtccatcgtaattgccatcattttttcgtatatagccatctggatggtattaaaaccaattaaaaagctgcaggaggacattacctgccagaacccggaggaggttcattttagggaaagcggaatagaagagatagaccgcatccaccaggcccttaacgatatggccgcaaagctggagcagagctattccaggtattcctttaccctggaatcagccggggaaaaggtgggcagctttgagtatcaggaaggcggctcacgggtcaaactgagctcatccatcctgcagctgctggatattgggtcggaccgcatgggttccgacggctgcctggactacgatgtatgggaggatatacttggcggtttggagcgggttatggaactggaggacggattttcctacacggacagggcctgcaataccagggccgtttccatacgccagagacatgaggaacacggcgtgttcggcattgttatcgacaagacggacgcatatatggagatactgcgtctcaggaatatatcccagcatgaccagctcaccggcctgtacaacgcgtcctaccttaaaaaggaggggcagaaaatactggacggaaacaggagccgggtcaatgcccttgttttctgtgatttggacaaccttaagtttgtgaatgacaattatggccatgagatgggagaccattacctgaaggctatggcggaccttctgaccggcattgcttttggggaacagtgcatggcggtccgcctgtcgggcgatgagtttgtattgttcttctatggctacagtgacagaaagaccatagaggataaggtgagatccggatatgaggggcgcagctccatccagctgccggacggcaccagccgcaggatcaatgcgtctatcggcctggcctttgcccagagggaatccgagcgcatggaggatctgataaaccgggcggacagagccatgtaccgggtgaagcgcacagagaaaaacgggattgccatttatgacaaaacagacgaggcagggccggtatagagcgtgtctaatgaccgcgttccggcccggccccgcttttttccaagcgccccttgcttttttacataaaaaaaattataatgtatcttgactatccataggaaaaggtgaccgaacatatggcaaatgagggaacaaaagaaaaactggatatcgaattggaagcgccggccgactttaccagccctgaagtgctgtatcaggacttgattaatacaatccgcaaatatcatccttcagatgatattaccatgattgaaaaggcttacaggattgcagatgaggcccacaaggagcagaagcgcaagtccggggagccctatatcatccatccgctgtgcgtggctattatactggccgatctggagatggataaggagaccattgcagcagggcttcttcatgatgtggtagaggataccattatgaccctggagcagctgaccaaggagttcggctctgaggtttccttcctggtggacggtgtcaccaagctgacacagttaaactgggataaggacaaggtggagattcaggcagacaacctgcgcaagatgtttttggccatggcaaaggacatccgcgttattattatcaagctggcggaccgtcttcacaacatgaggacaggtcagtactggaagccggagaagcaaaaggaaaaggccagggagaccatggaaatttatgcccccatcgccgacaggctgggcatttccaagattaagattgaactggatgatctgtcccttaagttccttcagccggatgtatattacgacctggtggagaaagtggccctccgcaaggatacaagggaggcctttgtccaggaaatcgtggacgaggtcaagagccacatggaggatgcgggcattgagtccacggtgggcggacgtgtgaagcatttcttcagtatctataaaaagatggtgaaccagaacaagactctggaccagatatatgatttgttcgcagtgcgcatcatggtggagaccgtgaaagactgctatgccgccctgggcgtcatccatgagatgtataagcctattccgggccgtttcaaagactatatagccatgcccaaacagaatatgtaccagtccctgcacaccaccctcatagggagcaacggacagccctttgagatacagatccgtacctatgagatgcacaggacagcggaatacggtatcgccgcccactggaagtataaggagagcggaagcggacaggtggctgcgggaagcgctgaggcaaagctcagctggctgcgccagattctggagtggcagagggatacggacgattccaaggaattcctgagcatggtcaagggagatttggatttgttctccgacagtgtgtactgctttacaccgtcaggggatgtaaagactcttccaagcggttctacacccattgactttgcatattgtatacacagcgccgtgggcaataagatggtgggagccagggtcaacggcaagctggtgcccattgaatatgtgattcaaaacggcgaccagctggaaatcatcacttcccagaactccaaggggcccagccgggactggctgggtattgtgaagagcacccaggctaagaataaaattaaccagtggttcaagagccagatgaaggaagacaatatcgtcagaggccgggaccagatagaacgctactgtaaggccaagggcattaactggtctgatatcggcaagcctgaattcatggaaaaggtcatgaaccggtatgcctataaggattgggattccgttctggcatccattggacacgggggcctgaaagagggccaggtcatcaacaagatgatggaggagcgggagaagaagttaaaacgggagattacggatgcggatgtgcttagcggcatagccgacacagcgggaagggccggtgaggccagtgtccgcaaatcaaagagcggtatcatggtcaaggggatccatgatctggcggtccgtttctccaagtgctgcaacccggtgccaggggatgaaattgtgggatttgtcaccaggggccgcggggtttccattcaccgcacggactgtgtgaacatcatcaacctgccggaggatgaacggagcaggatgattgacgcggaatggcagatggcggagggcgccagcaacaatgagcagtattccacggaaatcaagatatttgccaataacaggattggcatgtttgccgatatatccaaggtctttacggagaagcagattgacattacgtccatgaacgtaaggaccagcaagcagggcaaggccaccattatcatgacatttgacattcatgggaccgatgagctgaaccggctgaccgataagatacgtcagatagaaggcgtcctggatatagagagaacaacaggatagctgtgatgaaaggggaaggatatgagcgatattaggattaagacatgtgtactgggacaggtgagtaccaactgttacctggtttatgatgatcagaccaaggagggtgtggtcattgacccggctgacaacgctccttatattctgaacaagtgcagcgagctgggaatcactctcacggcagtcctgctgacccacggccattttgatcatatcatggctgtgccggatgtaatcagggcattcagggtaaaactctatgcctatgaggcagaggagaatatgctggcagatacaaagcttaatatgaccggaggattcagaggaccccagaccagcctgcatgcggatgtgcttcttcacgacggacaggagctggagctcctgggaaccaggtggaaggtgctgttcacaccgggacataccgcaggctcctgctgcttctatctgccggatgaaggaattatctttgcaggggataccctgttccgcggttcctacggcaggacggacctggctacagggaataccattcgtattgtcagctccattgtggacgtactttttgcgctgcccgatgataccatggtgtatacaggccacggagaccccaccaccattggatttgagaagcaggggaatcctgtgcttacagtaagagacaatatcctccgggtaaaaggaccggatgccttcaagcaggaataaaagaaggtttataatagaaagcaggttttgtatgattggacttttaatacaggataaccagtacgaacaggacatcagagaacttctgatgtccttttatccaggtgaggcttatgttcatgaggtaaaggacggggcggacttttacgtggagacgcggctgggagacggcgcggtttccatctatatatgggaaaatgcagccgccacggaggactgcggcggagataagacagggccggaggactgcggcgggggagcggccgggccggagccgggaaaggagcaggcgccatcatgcccggagggtttaaagggctggatgttaggggattcctgcacccgtccctcggacctttcggatcactccgccaccaagaatgtcataaagaaaatgttttacctcatgctggcagcgcgcacgggaaaggaaatgccctggggttccctgaccggcatccgccccaccaagatcgccctcaccaggctggaggagggctggaaggaggaggatatccggtcctttatgaaggaaacctatcttgccagcgatgaaaagatagatttgagcattgagattgcggccagggagaaaaagcttctggaaccattggattatgagcggggttacagcctgtatgtggggataccattctgccccaccacctgtctgtattgttccttcacctcctatcccatcgggaaatggaaggggcgcacaggtctttacctggaagcgctgtttaaggaactggaatatacggcccggaagatggagggaaggcctctggacacggtctatttcggcggaggcactcccacatccctttcagcggaggatttagaagctctcttaagcaggcttgagcagctctttgatctgagccgggtgctggagttcacagtggaggccgggaggccggacagcattaccatggacaagcttaaggtactgagggaccacggcatcacccgtatttccattaatccccagaccatgaaccagaagaccctggacctgattggccgccaccacaccgtggatatggtgaaagatcggttttacatggcccgggagctgggatttgacaacatcaacatggatctgattatggggcttcctgaggagaatatggacgatgtgcggctcaccctggaggaggtaaaggctctggcgccggattcccttaccgtccattccctggccatcaagagggcggccaggctcaacatgttcagggaagagtacggcgggctgaagattcagaacactccggagatgattgagctcagcgctgcctgtgcccgccagatgggtatggagccctattatctgtaccgccagaagaacatggccggcaattttgagaatgtggggtattccctgcccggcaaagcctgtatctacaacatccttattatggaggagatgcagaccatagcggcctgcggcgcgggaaccaccaccaaggtggtctttccttctgaaaaccgcagggaacggtgtgagaatgtgaaggaagtggagcagtatattagcaggattgacgagatgatacagcgcaaggagcgcatcctttaacccaggccggggcccgcggtttatatggacatatacggcgcggaagcgtaaatgccggagtcatgtaaaaagagacatggttccggcagattttattataacgattgagttaataaccatctgataaggagagatatcgtgaagaaaagagagcgtgtatttgcggcaatgaagcatgaaccggtggacaggattccctgttactttaccactcattttgccagggaggcagcctttgggcaggcagcggtggaagaacacctgaagtttttccgggaggtaaatccggatatccagaaaatcatgaatgaacatctggttcccaacatgggatccataaagacgccggaggactggaaatgcatcaggcccattacacttaaggataaatttatggaggatgagattgagctggtcaagagggtcctggaccggtgcgacagggacgcctttaatatcggtacccttcacggcatcgtggcctccaccatccaccccattgaaccggattacggctatatgccggtgcggcagctgctctgcagccatttaaggcagaataagggcccggtgcttgacgccatgaagcggattgcggacggactgtgccagctggcggggaaatttgtggaactgggtctggacggcatcctctacgcgggactgggaggcgagcggttcctgtttacggaccaggagtttgaggagtatatcatgccgtttgataagcagattatgaaggcctgcctggaagcgggaggacataacatcctgcacatgtgcaagacagatgtgaattttgaccggtacgacagttataaaggactttacagcattgccaattggggcatctatgagacgggaatgagcctggcggagggcaggaaacggtttgcggactgcgccattatgggcggcctctccaaccacaaaggaccactgatagaagggaccccggatgagattcgccaggaggtaaggcgcgtcatggcagaagccggtgagacaggctttatcctgggcacggactgcaccattcccatgggagtgccttatgagcgcatgcggattgcggcagaggccataaaatagggtccaaatagggaaaaatctatgaaaatgcttgcaaaatcataaaagttgcttaaaataaagatattgaacaaaaaacaggattggagaacgcgtatggcattagcaaagaagccggtcaccggcatgagggatatcacgcctgctgagatgcagattcgtgagtacgtgatgaatcaaatcaaagagacctataaaagctttggatttacccagatagagacaccctgcgtagagcatatcggaaacctgaccagcaaacagggcggagataatgagaaactgattttcaagatactgaaaagaggggacaagctgaacctggaagggtcaaaggaagagaatgacctggtggacagcggcctgcgctatgacctcaccctccccctttcccgctactacgccaataacgcagccaatctgccaagccccttcaaggccctccagatgggcagcgtgtggcgtgcggaccgtcctcagaagggccgtttccgccagtttgtacagtgtgacattgatatcctgggagatgccaccagcctggctgaaattgagctgattctggctaccaccactgcccttggaagaatctgcccagacaacggttttacggtccgtatcaacgacagaggcatcctgcgtggcatggccctgtactgcggttttgcggaggagtccatggaccaggtgttcatcaccctggacaagatggataagataggatatgagggtgtggagaaggagcttctggaatccggccacagcccggagagcgtaagcaaatatctggacatgcttaagaacgtgacaaaggattcagccggtgtaagggccctgggacagatgctctcagaggtgatgcctgccgatgtaagcgaaggactggcccacatcatggacacagtgacggaggtggctgaggctgatttcggcctggagttcgaccccactttggtcagaggcatgtcatattatacaggaactattttcgaggtctccatggaaggctttggcggctccgtggcaggcggcggccggtatgataagatgatcggcaagtttacaggcatggagacaccggcctgcggattctccataggctttgaacgcattgtaaccattcttatggacaatggattcactgtgcccggcgcttctgacaggaaggcgtttctctttgagaagggtgtggacagcgccaggctggcagccgtaatccgcgaagccatggaagagagaaagaagggcgtgcaggttctggttgcccagatgaataagaacaagaagttccagaaggaacagctgggcagggaaggatatacggagtttaaggaattttataaggaaagcctgaagaattaaggaaaataaaggagataagacaatggcagaatcaatggttgggttaaagcgtacccatagatgtacggaagtgaccactgcccatatcggtcaggaagtgaccgtcatgggatgggttcagaagagcaggaacaagggcggcatcatctttgtggatttgagggaccgctccggcatccttcagattatatttgaggaaaatgactgcggcgcagagaacttcgcaaaggcggaaaagctgaggagcgagtttgtagttgccgttacaggacgggtggaggcccgctccggtgcggtaaataccaacctggccacaggagccattgagatcagggctaactccatgcgcattctttccgagtccgagacacctcctttccccattgaggagaacagcaagacaaaggaagagctgcgcctgaagtaccgtttcctggatttgagaagaccggatatccagaaaaatcttatgattagaagccaggtggctacccttaccagggcatttctggcatcagagggattccttgaaattgagacacctaccctgattaagagtacgcctgagggggccagggactatctggtgcccagccgcgtgcatcccggttccttctatgcccttccccagtccccgcagctgttcaagcagctcctcatgtgttccggttatgaccgttacttccagctggcccgctgctaccgtgatgaggacctgagggcagaccgacagcctgaattcacacagattgacatggagctgtcctttgtggatgtggacgatgtgctggatgtaaatgagcgcctgttaaagaagctgtttaaggaaatctgcggttttgatgtgcagctgcccattcctcgcatgacctggcaggaggccatggaccgctttggatctgataagccggacctgcgttttggtatggagcttaagaatgtttcagaggtggttaagggctgcgagttcgcagtgtttaagggcgctctggaaaatggcggcagtgtgcgcggcatcaatgcccaggggcagggacatatgccccgcaaaaagatagacgctctggtggaatatgccaagggctttggcgccaggggtcttgcctatgtggcaatcagcgaggacggcaccgtcaagtcctcctttgcaaagtttatgaaggaggaggaaatgactgccctgataagcgccatggacggaaagccgggcgacctgctgctgtttgccgctgaccggaataaggtggtatttgatgtcctgggaaatctgcgtctggaactggccagacagctggatttgcttaagaaggatgactttaagttcctgtgggtgacagagtttccgcttctggaatattcagaggaggaggaccgctacgtggccatgcaccatccattcaccatgcccatggatgaggatttacagtatattgattctgatcccggccgggttcgtgccaaggcatatgatattgtgctgaacggcgtggagatgggcggcggatcggtccgtatccatcaggctgatatccagtccaagatgtttgaggtgctgggctttacgcctgagagggccggagagcagttcggcttccttctggaagcatttaagtatggtgttccgcctcacgcaggcctggcatatggcctggaccgcgtggtgatgctgatggtgggagctgacagtatccgcgacgtgatcgcgttccccaaggtgaaggatgcttcctgtctgatgacagaggcgcccggacaggtggatgagaaacagctggaggagctgcatatcgcggttgccgctgaggaagagtagtattatatataagattatcacatggagctggtcctatgggccggctctgtttttttgctttgacagtcagaatgcaattttcaaacaaaacaaaatagagaaaaaagcagttgacatttttaaatctgagtatataatgtaaatataaacatatgaacaatcattcatatgaatgagaaaaataagagagggaggttatgagccatggcgataaacgatgtggagtgctgcgatttttaccaggtccatgagaatgtggtaaaggcagtcaatgataagatgccggatgaggataagctatatgatttggcagagatattcaaggtgtttggggattccaccaggatcaaaatattatatgtgctctttgaggctgagatgtgtgtctgcgacattgcgcagctgcttaatatgaaccagtcagctatttcccaccagctgagaattcttaagcagaaccgcctggtaaagagccgcagggacggaaaggcagtattttattcgctggcggacagtcatgtgaggaccatcatcaaccagggcatggagcacatagaggaatagactttgaggcagatgcccatggcgcggggatgggatatggaatataaataaaataacaaatatggaggagaataatatgaagaaaaaattcaaactgcaggacctggattgtgccaactgtgcagccaagatggaggaagcaatcaagaagatcgagggtgtctcagatgccacggtgagctttatggcccagaagatgaccatagaagcagatgacagcaggttcgatgaaatcatgaaggaagtggtgtctgtgtgcaggaaggtggagcctgactgcgttatcctgctttaagcgaagcagtacggcaccggaaaggaaactgatatgactaagaaacaaaaggcaatgctgtcccgtatcatagcagcattcatcatttatattaccctggcagtgacagaccatatggagattttaccggagtggcttgggttgtggggaaagatggccctgtatctggttccctatgttcttataggatgggacattgtatataaggcattccgcaatatccgcaacggccaggtgtttgatgagaatttcctgatgacagtggctaccttcggcgcctttggcgtgggggaatattcggaagcggttgcggtcatgctgttttatcaggtgggagaactgttccagagctacgcagtaaaccgttccaggcagtccatcacggagcttatggatatctgtccggaatatgccaacatagaggaggatggccagttaaagcaggtggaaccggacgatgtgcaggtgggagatatcatcgtggtcaaggccggggagagaatacctcttgacggcaaagtcgtgtttgggaactccatggtggatacctcagcactgaccggtgaatccgtgccgcgcaaggtggcagagggggacgatatcataagcggctgtgtcaacggcagcggccttctgcgggttcaggtcacaaaagaatttgacgattccacagtggcaaagattctggaactggtggagaacgccagcagcaaaaaagcccatgtggagaacttcattacacggtttgccagatattatacccctctggtggtaatgggggccgtgctcctggctgtgattcctcccctgttttttggccagtcctggtccgagggtgtaagaagggcctgtaccttcctggtaatctcctgcccgtgtgccctggtgatttccgtgcccatgagctttttctcaggcattggcgctgcttccaagaagggtgtgctcatcaagggaagcaactatctggaggctctgtctgagatggataccattgtctttgataagacaggtacgctgaccaagggagaattcaaggtgactgagattcacgcggtaaccggcagtcctgtcccggaggcgtctgaggtaccgcggaccagggtgtgggcggccagccagccttctgatgagggaaagcgctccctgctggagctggcggctttggcggagagttattcggaccatcccatttcgcgttccatcaaggatgcctggggagatgccattgatatgaaccgtgtcagcaatgcacaggaaatatccggtcatggagttcaggcggagatagacggtcataccgtactggccggcaacagcaagctgatgaaagaaatgaatgtggcgtatcaggagtgtatgagcatgggtacggttgtctatgtggcactggacggcgtatactgcggatacattgtcatagcggattccatcaaggatgaggcctttgaggcaattaagaatcttaaaaaggtaggcgtcagaaggacagtcatgctcaccggcgacaagaaagaggtaggagaagcagtggcggccaggctgggtctggatgaggttcatgcggagctccttccgggggataaggtggcaaaggtggaggagctgctggcccagcagaccggaaaacacaggctggcctttgtgggagacggaatcaatgacgcgcctgttctctccagggcggacgtgggcattgccatgggaagcatgggttcagatgcggccatcgaggcagcggatattgtgcttatggacgataatcctgccagaatcgcggatgtggtccgcatatcacgaaagaccatgtccattgtaaagcagaacatcgtatttgcgctgggagtcaaggcagtggtgctcttaatgggtgctgcgggcatggccaacatgtgggaggcagtgtttgcggacgtgggcgtgtcggttattgccattctcaacgcaatgagagccctgtccctgtaataagcgcgcagccctttaacagcgaagaaagatttcgccttcagaagcatgaaaaaagcgtatcgggtacatgaaaatacatgacaacccgatgcgctttgtttgattcatggcggaaaatattgtataagtgatgacagccaaacatggtcaaaccattacagaaggatgtcctccaggctccgttttggcacatagtgaacctgattcccgtcacggtagtatgcggtggagccgtcttcctttaccggcaccagtaccacttcctccttgggctttccaagggccagcaccaggtctatgctgtaatgctccggatcaagacccaggagccgtccaatctctgaccgcatgcagctgccaatcatacagccaccatatcccttttccgcggcagccagcatgatggtctgggccgtgattccatcgtcccactgtttgtttttcccgatagacaggtcacaggcaatgacgatataggctgagggtctctcgccctcctctggtccctcccaatccttcagggcgcccgcccatgcagtatacgggaagataccggcacattcctcgggcgtgcacaaaattttgaatttcagggcctgggcattggaagcagaagcggccagacgggccgtatccaccatatcagccagttcactgtatgggataacagtatcctgataaaatcttctgtaagagcggcattgtttcacaaggtctttaagcataggcttcctcctaatccggcagttcgtggccgtgggtgatgtggcgcttgatggcatcgaagctctcagcgctcagggtgtgttccatgcggcaggcatcctcagcagctgtcctggggtccacacccaggtaaatcagccagttggacagcagtgtatggcgttcatacatggtgtccgctatggcctgtccggatggcgtcaacgtgatatgtccctggtcgtccatctggacatatccgttctggcggagattcttcatagccacgctgacactgggtttggagaagcccagctcagtggcaatgtcgatggagcggacatagggctgttccttggccagcatgagtatggtttccagataattttctgctgattcctgtattttcaagtctgtaaatacccccgtttatttagtatgatagttctaagtgtaacatataaaaaaacgattgacaagagagttagaaagtgctaatctgtgaatggagttagaaatagctaacctacaaaaatacggcagaagaaaaaggcgaagggccgttaaagagcccgtggcagatgtggagcctggagcaaacggagaacctgtggcaaacggagagtccgggaataaacaggaaggaaaggaggatatatatgaatctttcaacattaattattctggtcatattggctgtgattataggggcagtggtccgtattatgataagggataaaaaggcaggtaagggatgcggcggatgtgccggcggatgcggtggctgcgcgggttcctccatgtgccatggataccatgagcacgggaaacgcgaggggtgacgccgggatgaaacggtcaataggattaaatgtataaaaggaagttccgcggggcaggtatcggcttaagtctcccgcccggaacttcctttttattatttaatcctgtgactggtttttactcggatttaatttccttccacatgtcattgtagatggtgtccacatcgtctcccagatactggataatctcgcagtttggcagcttatccaaatcagggaacagggccttgttgtttttgaggtcgtcgtccagcaaatcataggcgcctgtgtttggcgttgcgtaggtaatatattcaaagttctttttggcaatatcagggcggcacaggaagtcaatccatttctctgcattttccttgtgctccgcgttggcgggaataacccaggagtcgatccagtaattggttccctcctcgggaattacatactccaggctgtaatccagaccttgttccgccacagcatcctggatgtagagcatttcaccggaataaatcacgcccacagcagcctcgccgccaatcatcttatcccttacctggtcaatgacatatgcctggacaaggggcttctgctcgatcaacaggtcgcgtgcctcggccagctcatcgggattggtgctgtttaaggagtatcccttcatcttcagggccacggtaaacgcgtctcttacactgttctgcataagaatctcgccgcttaagcgctcatcccacaaatcagaccacttggtgggaacgggaacacccagctcctccagacgcttggtgttgtagagaattcccatggttccccagcagtagggtacggaatacttgttctcagggtcaaatcccttggagatatccagatactgctggccgatctccttatagttagagatgttgtcaaagttcagctcagccagaaggccgttctcaatcatgcgctgaatcatgtagtcggagggacatactacatcgtattttacagcgccggcctcaatgacaggatacatctcctcgttggtctcaaatacatcgtagacaacctgtatgccggtttcctcctcaaactgggtgatgacgtcctcgtcaatgtactcgccccagttgtatacgtttaacttgttgtcttccttgtttcctccttcgggtgaggaaccggacttgccgcagccgattaaaagggcggcggacagcactgccatggatgcggcagcaagggtgattgccattttctttttcataatcgttctcctttaatgtctgaattcggttatgccttttccggcttcttaatggaccggaagttaacaaagatgagaagaatcagcacggtcaaaaatataatggatgacagtgcgtacatggacggccgtatgccgcgccttacctcgctgtaaatcagggtggacagggtgttaatgcccgcgccctttgtgaagtgggtgatgataaagtcatctaaggacatggtaaacgccagcaggaagccggagagcacaccaggcatgatatccgggaacaccaccttgaaaaatgcgtacagaggggatgcgcccaggtccagggcggcctcgtaggtgtatttatccgtctgcttaagcttgggcatgacgcttagtatgacatagggtatattaaatgtaatatgggatataagcacggtcttaaatcccagggaaataccaaaggcaatgaaggccagcatcagggatataccggttacgatgtcagcgttcagcatggggatgttggttacgcccatgacaatggttctgggcacggtccgcatggaactgatggagatggccgctgccgtgcctatgactgttgccaccagggccgatacaaaggctatgattaacgtggtggtcagggcgctcatgatagagcggctgtcaaacatctgggtgtaccactgcagggtaaatccgccccactgggtcctggatttggatttgttgaaggacaggaccatcatggtaaggatgggggcataaaggaagatcagtatgagcaccatataaaaatccgatatgattttccgcagtacttttgaactctttgtcatcagaatgcagtcccctctccgtttttatcgtatttggctatcatggccatgctgattaggataaagaccatgaggaccagtgaaagtccgcttcccagatgccagttgcttcccctggtaaattcctgttcaatgacgttgccgatgagcagaatcttgctgccgcccagcaaatcggaaataacgaaggtggtcagggaagggacaaacaccatggtgatgccgctgatgatgcccggtatgcttaagggaaaccatatcctggtgaaacgctggaagctgttggctcccaggtccatggcggcatttataatattatcgtctattttggacagcacattgtaaatgggaagcaccataaagggcaggaagttatataccatgcccagcacaatggctgacggggtgttaatcatggactgggacgggaggtgaagccagttaaggataccgttaatgactccgtttttctccagcagtgtctgccaggccagggttctcagaaggaagttcatccacatgggaaggatgaatatgaatacaatgaatcctcctgccgcggctcctcggccccttagtatcatggccaggggatacgctaacaaaagacagagaaccgtgctcactaaggacagtccaagggaaagccacagggcctttgcgtggtccgcagaagcaatggcaatgacatttgccatggtcaggccgccgcccttgtcagtcagcccgtaccatataatcatggccagtggaatcagtgtaaagccggccatccaaataagatagggacctgataacagcgccttgccgatggcggcaccttttttttcgctattcattgactcccagcgcctcctcgtcttcagaagcaggcttgttcatgatctggatctcaaagggctccacatggatgcccacctgccggcctacaggaaacatatcggtggaatgcaccagccactcgaaaccgtccggggtggttacctccatctcatagtggacgcccttgaaaatcaggtgggtcacaacaccctggagggttccgtcctcaggctttacaaggtcaatgtcctcaggtcggataaccacatccacaggcttattattgccgaaacccttgtcaacacatgcaaagcgggcgccgaagatttctaccagttcgtcccggatcatggtgccgggtacaatattgctctcaccgatgaagtcggccacaaacgcattttcaggctcattataaatctgctcaggggatcccatctgctggatgtatccctggttcatgaccacgatggtgtcggacatggtaagggcctcctcctggtcgtgggtcacatagataaaggtaattcccagctcattcttaaggcgtatcagctcgtactgcatatcctggcgcagctttaaatccagcgccccgaggggctcgtcaagaagcagcaccctgggttcgttcacaatggcccgggcaatggcgatacgctgctgctggccgccggataaagagtccacggtccgtttctcatatccgggcaggttcactaatttcagggcatatttgattttgtcatcaatgtaggactttggcttgttcttaatctttaagccgaaggcaatattttccgcgatgttcatgtggggaaacagcgcatacttctggaatacggtattcagcgggcgtttgttaggtggaatcatggagatgtcctgtccgccgacgattacctttcctgtgtcaggggtagtaaagccgcctaatatacgcagggtagtggtcttgccgcagccgctggggccaagcaaggtgacgaagctgttctccctgatggaaaggttcaggtcgtccaggaccagctcgccgtcaaaactttttgatatgtgctgtaaatcaatgaaaggctggctcatgataatcaaaatctccttttatcttaatgtgattaaaaacttggcggcgagctcacccacagaagaagggccccgttcctgcttgtcaggtaatgtttcttatccggcgtgaagtagaaggactcccctttctttgccttgtatgtcttgctgcctatgtggatggatatgcttccctggagcacgtatccgaattcctcaccttcatggggattatcaggataggtggaacctccggcctttaaggtgaggaggatgggctccatcacatttttctgggcattggggataatccatttgatttcattatttaagtctgtatcaattttctcaaaataatcctgtttaccaaatactacctgttcatccggcgtttcattgaagaattcaccgatggtggtgcccaggcactgaagaatgtccatcagggtagctatggatggagacgtcaggtcacgttccagctgggaaatgaatcccttggaaagctcggcccggtcagccagttcttcctgggtcagaccctttaacacccgcagttcctttagtttacttccgatttccatggagctcctccctgtctcgcgtttctgaacaaaaagtttacaaatactaactgactataaaaataagcaaaaagtttagtaataataaacaagcgcgaatttcattatacattaaatcagtggtatgtcaatacctttttgaaagatttggcagataagtttagggacaagtttagggatgaacagcgggggagaatttcacaaacttccagttaacaaattcacaaatttatgatatgatgtttttagtctaaattgaaatgaaaaccgacataaatcagggaggtacagacaggtatgagcggcaaatatatggcatatgtaggatcctattcctacaccggaaaagcaaagggaatcacagtgtttgacgtggatgtgaaaaacggaacatttagggagaggtgtgagatggaagtggacaactcctcctatgtcattgcttccagcgatgggaaaaccttgtactccatcgcggatgagggagttgtatccttccggatcctgcagaacggaagccttgcaagactgaacagcgctcccatccgcggcatgaggggctgccacctgtgtactgatatggaagataaatacgtgtttgtgtcaggctaccatgacggcaagaccacggtcttaagccttaacaaggacggttctgtggggcagattgtggacgaggtgttcaacaagggatacggcagcgtggctgagcgcaacttccgctcacatgttacctgtaccagaaggatgcccgacggcaggtatgttctgtcggtggacaacggaacggaccaggtaaaggtataccgtttcaacgacaaggataagaggctgtttcaggtagatgccatccactgcgacctggagtcggctccaagacatttccgctacagctccgacggacgtttcctttatctgatgcatgagctgcagaatgtaatctgcgtttattcttatgaaaccggtgacagggcgcctgtggttgagaagatacagactatttccaccacctccaccaagaatccgggcaatctgacagctgcctgcgccatgaggctgtctccggatgagaaatatgtttactgcaccaatgcaggtgaaaatacagtgagcatctacagcagggatgagaaatccggtctactcaccatgatctgctgtctgcctgtcagcggtgaatatccaaaggatgtggctatattcccggatcagaaacatatcgcgtccataaaccatgacagcggcagcatcagcttctttgaagtggattatgagaagggcctcatcgttatgtgcggacgaagcgtcatggtgaacgagccaaactgctgcgctattgcgaagattggaaattagtctgagaagatagttggattgatgagatagtaagaattagtgagacagctggattaacgagatagtagaattagtgagacagccggattaacgagatagtagaattagtgagatagccggattaacgagatagtgggttatagatacaggaggacaggagacagtatatggcaggttctgcattgggaacaatattgagagtgacgacctggggagaatcccatggaaagggaatcggcgtggtggtggacggctgcccggccggactgcctctggaagaaggggacatccagtcctatctgaaccggcgaaagccgggccagagtaagtttaccacggccagacaggaaggggaccaggtggaaatcctgtccggcgtgttcgggggaaggaccaccggtactcccattgctctggaggtgcgcaatacagaccagcgttcccatgactacagcaatattatggatatttaccgcccgggccatgcggattacacctttgaccagaagtacggattcagggactacaggggcggcggacggtcctcaggcagagagaccattgcccgtgtggcggcgggcaccattgcctgcaggcttctggaaagccttggaattacggtcagggcgtatacaagagaggtgggcggcatttgcattgcacaggagcgctttgacctggacgagatgtggaataacaggctgtacatgccggatgcccgggcagcagcacaggcagaggcccggctggaggaactgatggccgggaaggactcctgcggaggagtggtggaatgtatcatccacggtatgcctgccggagcaggagagcctgtatttgagaagctggatgccaacctggccaaggctatgctgtccattggcgcggtcaagggatttgagataggagacggctttgccgcatccagggcacggggatctgagaataacgacggattcggcatatcacataaggcagcggacggcagcccgcatttgagcggcaggattgagaagcagaccaatcactcaggaggcacactgggaggaatcagcgacggaagcgatatcgtgatgcgggcagcatttaagcccaccccctctattgcccagccccagcacaccgtgaaccaaaacggtgaggagaccatggtggagataaaaggccgccatgaccccatcatcgtgccaagggccgtagtggtggtggaagccatggccgcattgacggcggccgacatgctgcttctgtccatgacatcccggctggaccgggtgcaggccttctttgcccgggaaagggtataacataacacagaaatagataaaaggagaagagaaattatgaaaattgcaattggtaacgaccatacagccattgagcttaagaacataatcaaggagtttgtggaagaaaagggctacgaggtcattgacctgggaaccaattccaccgagagctgcgactaccccatatacggcgaaaaggtaggacgggccgtggctgacggtcaggctgacctgggaatcgccatctgcggcaccggcgtgggcatctccctggcagccaataaggtaaagggaatccgggcctgtgtgtgcagcgagccttataccgcaaagctgtccagagtgcacaacaactccaacgtacttgcatttggcgccagggtagtgggcagcgagcttgccaagatgattacagaggcatggctggacgctgagtttgagggcggccggcatgagcgcagggtgaatatgattatggagattgagaaccggtaggatggtacgcggctgttctgaaacacacccactggcccttccgcgccccagataaaaagggacactgcttaaagtgcctcaaggctggtgttcctaatagcacttgttcgtgaatctaaattgaaatttcaatataacagtaaaaagcgtccgtctgtcttttctccttagcgtgggaagagacagcgggcgcttttgaatatgtagtgggtgagaaacaggggagtcactgctgctcctctgtttctcacggaccgagctccctacaggcgcccgcgtaccattcttctacctcttaatagttctcaactttcctctcaaaataagccttaggatgagcacagcaaggacatacctcaggagcttccggtccttcgtggatgtatccgcagtttctgcacttccagccaagaggcgcatcgcccttgaaggtcttgtcgttctttaagctttctaacagcttgttataccttctctcatgtgcagcctcaaccttggcaaccagttcaaacttaacagccagttcctcgaagccttcttcccgtgcttcacgggccatgcgtgcatacatatcagtccactcgtaattctcacctgctgctgcgtcagccagattctcctcaggagtgccgatgccgtgcagttccttgaaccacatcttggcatgctctttttcctggtctgcggtctccaggtataaagcggacatctgctcataacctgctttttttgcagcggatgcataataggtgtatttgttgcgtgcctgggactcgcctgaaaatgcgtcctttaagttctgttcagttttggttcctgcgtattttgatgccataaattgtacctcacctttctcttttgtttcgttttttactacctataaactattgtatcctgttatttacagaaattcaatctaaaaatcaatattttactgccattcattgtcggggaaatatgtaataaattagtttaagactgatgcgtttggctggggattatgaaaaacatatggcagataagaatacaggcagccctggggagactacctgtattcctggtttggagggtaaaattgattctatgtcaaaaattagccgaaatatctgtttaaaagtccttcaaatgccttgccgtggcgggcctcatccttagccatctcatgaacggtgtcatggattgcgtccaggttaagggcctttgctctcttagccaggtcgaacttgccggcggtagcgccgttctcagcggcaactctcatctccaggttcttcttggtggaggaggtaacaacctcgcctaacagctcagcaaacttggcagcatgctcagcttcctcaaaagcagccttggcccagtacatgccaatctcaggataaccttctctgtgggcaacccttgacatagccaggtacatgccgacctcggagcactcgccttcaaaattagctcttaaatccatcatgatatcttcaggggaaccctgagccacgccaacctcatgctcgcatgcccatgccattccttcagaagcctgctctttaaacttggaagccggcacaccgcactgtggacatttctcaggtgcattctctccctcgtaaacatagccgcaaactgtacatacccatttcttcataatcaatattctcctttttccttcattttagttattcatttttcgataatagtaattgttactgatattaatataaaccatattccaggatttgtcaagtgttattttgtaaaaagtttcacctttttggtatttccggcttaaatgagccggatgaaaccagaggctgggatgtgatgcttaaaacaggatttaaccgaagtatctgtttaacaaaccctcaaatgccttgccgtggcgggcctcatccttagccatctcatgaacggtatcatggattgcgtccaggttaagggcctttgctctcttagccaagtcgaacttgccggcggtagcgccgttctcagcggcaactctcatctccaggttcttcttggtggaggaggtaacaacctcacctaacagctcagcaaacttggctgcatgctctgcttcctcgaaggcagcttcagcccagtacatgccaatctcaggataaccttctctgtgggcaacccttgacatagccaggtacataccgacctcggagcactcgccttcaaaattagctcttaaatccatcatgatatcttcaggggaaccctgagccacgccaacctcatgctcgcatgcccatgtcattccttcggaagcctgctccttgaacttggaagccggaacaccgcactgtggacatttctcaggtgcattctccccctcgtaaacataaccgcaaactgtacatacccatttcttcataatcaatattctccttttcctttatgcatttcgtgtgaatccccgggattcatttatttgttaaaataataatagtaattgttactgatattaatataaaccactttgagagatttgtcaatagatatttgaattttttttaaaacctgaaataaaaaatgtgagcataaaaaatgagagtgggaaagcagggggatgggttaatataaaggccagcagggaagaattgtataatagaatagcaaagaagaatagaaaagaagaatagaatagaagggtggggaagaagattagggaagaagattggagaagaagagcgaataaggaaaacaaataagagaaatagataagagaaatagataagagaaatagataagaaaaacagataagaaaaaggataagaaaaaccaaataagaaaaacaaataaagaaaataggcaaggaataaagagaaagataaaccggagaaagagattaaaaaggaagaagttcaaaaaagaaaattaaaaaagaaatatcccgaaagccgcagagggaacatatggcgcccggccggcaccgtggaggactttggggatatttctttataatttccttatgttatgatgcgtattcaattaataaaatagtcactgtgtgttaaactgccctggtccaggctgttcaggaagctgcctagcagggtgctgaattcctgggccttgacaccgtccatgtggccgtcgtagtcccagtacccttccatactgcggtccataagctccggcttcatataattgaagttataatattccagacccaggccttctaagagcttcttaaaatacaggtgggactggtcataggaaccggcaaatttatcaagggtttcctgggggacaggcgtggtgatgacagtcagttcaatgccgtttttccggcagaacgcagctatgcggttaaaatatagctctgccttggattttacctggctctcatcccaggggatgttgttgaaggtgcctttatcctcgcctgctacccggtcccgatagataaagccccggcccgcgtaatggcctcccgggatttccaggacagatgggtcatagtttttataggcagtgctttgcttgcggcgtatgtggtccgggacctggcctattaggttgcggtagtagctccacggagccagtgcagagcggaaatccaggtttatgattttatccaggaaataaaaaaacttggacctggaagccgggaactcctgatagaagaaaatctgggtggatccgcttcgctgttcattcatccagtatgaggggtccagctcgtatacaacgcgggacggcgactgggtttcacaggcaagccgcagcatatggtacatatcgtccggataggcgtccgccatacacagactgacggagctgccgccggaggcagcatccacggaaaaggggtcaatgccatactgcccgtgggaggtgccaatgaagatcgtgtcgtatgtctctccgtttctaaggttatgaagattgattctcacggagcttggaggtataaaaccatagttgagagctgctgtgatgcatatgcacagggacaggaacaggatggccttcagccactgtggaagccatttgtgaaaacggccggctccttggttagaattgggcatatataaaacctcctcccgtcatggtaatctggcccagcagcggtatggaaaagagcagcatcagatagacgcaccatctggcggccagcggctttgcggacagggtatcccgtatgttgacatggttttcctggagaaggctgactgccagcaggacagtgcaggagagggccagggcggcatagtccttgagatccaggcccagcctgagaaggctgccgtccgacagggcagccagggagaatccggtaacggtattcttcatcatggtcaatgcggctcccaggcttacagccatatcaaaataccagctgatatttacaagaaggaaggttcttaaaatccggaccgccctccagggcctggattcaactggtatgtgcagtttgcgggccatttccccgtaaaagggggcaaacaggttgctggcggcaatgatgattccgttataaagtccgtagacaatgaatttccaggcaggtccgtgccacacgcccaccaggaagaataccagcagattggcgatacatacaggcagcactctgctcacatgctttccaaaatgttttttacagaatttcccgaatttgttcatgccctttgaaagtgaaaaaggatagaacacatagtccttcatccaggtgcccagtgtgatgtgccagcggtgccagaagtctgatatggactgagcaaaataggggcgtttaaaattggcgtccagggatatgccgaagcactctgaggcgcccatgattacatccatgcctcctgagaaatcgccgtagagctgaagggaatagcacagtacaccggccatcaccaggatgccgccataggactggtaattgccgaatacttcgctgacaaccaccgcagccctgtccgctatgacgatttttttgaaataaccccagagcatgagctgaagtcccctctctatgcgggtaaggctgaagctcttctggccgtagagctgggatgccagacggtcgtaccggccaatgggcccctgcagaatctgggggaagaaggagacaaagagggcaaaacggaacggattgcggtcaggcgcgtatttacctctgtacacgtcgatgaggtagcccatggactggaaggtgtaaaaggagattcctaagggtagcagaagctttgcagaggaaaaatgggtgccgaagagaaggttcatgttatctgcggcaaaattgcggtattttaatgctgccagaatgccgaagtttacaaagaggaccagggcagcaatccatttcttgcgctgtttgaaccgcccctttaaggcttttttttcgtccggggaaaggggctgctgaggattggccgggcgccggaggcggtccgggccgcagtccagcatatggtccgggccgcagtccagcgtatggtccgggccgcagtccagtgtatggtccgggccgcagtccggagtacggtccggatcgcgcgccggagttcggtccagggcgcaggctagggcgcggtccgtgtgctccagccacagcccgcccagaaaggtagtggcggtagtggtcaggatgaacactaccgccgccgggccggaggccagataaaatatatagctgaagatgagcagccatacccactggagctgtcttggtattacataatatccggccactgctgctgccagaaacagcaggaatttcattgaaagaaacgacataacatactcctctaattgtccttaaggcgctctaccatgttccagagggcctgggcagagttaaaattctccggaataatgtccaccggtgatatctcgattccgaaggcatcattcagttcgctgacaatggacaggatatcaaaggaatccagatatccgtcatcaatcaggcctgtgcatgtcctgaaatccacggtgggttttatgtcttctaacagttctaataattcatccattttattgttctccttttacgtgtcagagcatctttaagaattgctctgtgattgatatatctccatggcagagccgtcgttaagtatatctgtgggcagggcgtcccgcaccagggaaaggccgtgttcctgtgtgcaggtgaggaccacggggagcttccggctcagaaaaaggtaaatgccctcggttacggagtaagcgccgatacggtcaaataccagcaaatcccctgtcatcaggccgtccaggggcagattttttacaagtatatcccccgatgtgcagagggagccgcatacggtccagcggtcgccggaggtttgtgatgccggagggcgggccggattgtcctggggaatataccggtaagcaggcaccttcatggccatggtctgaccataatagttgacgtggttaatgccgccgtccacaatgcagtaattctgtccctggcttcgtttcacgtccgccacgcgggtcagatagctgccgcagggagcggccaggaaacggcctgcctcgagaaagattatacctttaaaattcagggaatcaagggcttttttgaattcctgcaaaagaatttcttcgtcagcctgttcctgtccttcaaaataaggtatctggaagccggggccatattccagctcccgaaactcaaaatccagatgttccctgacaaaatccataaatgaatccagctttaccagctctttttctatcttttccattccctttttctgggttccggaatagtactggaggcctgccaggtccagatggggataggagtcccgattacggattgaggtgaggatatcctcctcatccatcccaaactggttgccgctggtcaggcgcagaagcaccctgaccccggtgcggcctgcggcgccggcacaagcctctaaaagcctgagctgatttaaggattcagctgtgtaggttccggcgccctgctctgccatgaccgagcggatgtgggattcctccttattgacaccggaaaggacgattttctgggccggcacacgggcgcggcggcagatggcatactctcccggggaacagacctccaggccgccggctgcctgggcagcggcagctgtcaggaaggggttggccttcatggcgtaatagatattcacctgttttccaaggatctgttccatgcggcggatacgtgagataaacacgtctaaatcaaagatatagcaaggcgtgttgtatgtccgggcagcttcctgcaatatatggttatccataaagcctcctgagtgcctgccggtccactttgccgtttttggtacgtggaagttccgtcaggtttctgtataaagcggggaacatgtagcgcggcaggagatgttccaggccaacggcgatgtcccttttgacagcggctccctcatagaaggccgcaattttgtttttttcttccaggaacaggcataccgccctgtccacaccctccacggtttcaagggcagcctcaatctcgccaagctcgatccggtgacccatgtgtttgatctggaaatccttccgcccgttgaaatacagaagtccgtccctgccgtagcaggccaggtcgccggttctgtatataatctcaggatagcagagatttaaggggttctggacaaaggccgtggcagttcgttttggatccctgtagtagcccagagccagagcggttcctgccacacagagttcgccgttttgtccgggttctgtgaccagcctgttactttcatccagcaggaatactgtttcgttgggaaagggtactccgatgggaatgggggttccgggttcaaattcccggtccaccacatagtatgtgcagttgcaggtaatctccgtggggccgtacaggtttacaaacagggcatctggcaggtaactgcgccaggtattcagatgctttaccggcatgacctctccgctgaagagaatcttattcagatgggatggaatgcggtaggtaaagcctttcagggtggtaatgatgcacagggcggaaacggcccagatggccgtggtgattttcctgtcgcacaggtagtccagaaggccggtggggatggaaaacagttttttgggaataatttccatagtggctccggttttaagggcggagtagatgtcctttacagatacatcaaagtcaaagggcgcctgattgccgatgacatcatcctgtgtgatatggaacaggtccgtaaaatgctggatgaagtcaatgacggagcgatggctcaccaccacacccttgggcacgccggtggagccggaggtgaagattccgtacaaggggtccgtatcagcggcctgcctgcggatggacgcaaggagactgctgttcagggcgtcatccggcagagactttaagtcctccaggaacagtatctcacctgaaaaggagataccgccggccaggtcaaggctttccttatcggcaatcataaggtccgccttaagggtgtccagaatccggttcagacgttcggccggctggtttgcatccaggcagacataaaaacagcctgcccggacaatacccataaaggcgctcagggtaaatacatttttttctgtcagcacgggtacaggtcggcgcgggcctgttttctgtgccagaatgctgccgattctcatagacaggtctgacagcccgcggtaggtaaggcttgtatgttcatctgcaaaagccgttttccggggatgagcttctgcggattcttcaagaaaactaagaatattctgtatcaataataggacctcccacagcaggtattttttagcattttcgtgcttagtctagcacagatggataaggggttcaaggctttaagcgtgaaaaattatgtttaccaacgattaggtagtgaagatggatggatatctggatggtttagaggtgtaccggaaactgttttaataattcacggtatcaacggaccgacatttattaacgggatatggtaaaatctatttgagatattttgcctttgaggaggttgaatagacgtttgattaggaaaagaaggctatcgcggtaaaacgatagccaatcttatggggagggggtcaaaactttggtcgggcaatatagtggccgtatcctttttcgcctgtcagtttaaaatcttttgccacagtttttcctcgtacaagagtcatgactgggcaacccttgaatgttctgccaatgaagggagaccatttattcttacactgaatcatgtcttctgtgaataccatctctttttccatatctacaataacaaggtcggcatcatacccaatttctatacgtcccttgcctggaagctggtacagaagagcgggagtataactggtcatttctactaatttctccattgtaatccaaccctccgacactaggttaagcagggtgggaagcagaatttcgagcccgggaattccattgggtgagtcccagatgcaatccagaccggggaccttttcgtattcggcatagggagagtggtcggaggcaatggtatttacatacccttttttcatctgttccagtatatgcgcacggttttctttactgtgcaccggcggggtaaatttaagatatggtccctgttcttgtacatcagtctccgtgaaggtgagatattgggcacatgtctccgcaaatacaggtagaccgcggtccctggcttttttgatgctttccaacccttcccatgtacttacgtggggaatgacagttgtaattcctgtgtcctccacatagtatatgattctgcgtattgcctccacctctgagagaacgggatgtgactggcagtgggccataccgtcacagcgtccgcggtccctcagctctttttctgccagggcgataaggtcatggttctctgagtggataatcatagttgcgttgtgatcagccaacagcttcatgtttttgtagagtatgccatctcttacccagcccatatctggggaagaatagcaggtaaatactttgacggccgtaattcctgtatttagccagaattcttccaactgcccatcattggatgcgtccaatcccccatggaccgcataatccacataaccattaccttcataggtgtccagtgttaattggagatttgttttatttaggacaagaggcgtattggtgggcatggcaatggcagtggtgatgccacctactgcacaagcagcggtcccatggggaaagtcttccctgtgggttgtacccgggtcattaaaatggatatgttcatcaatgcagcctgggataataaactttccggatgcatctatgatagtctgggccttgggagtaatacttgggtttaacagttcacagagtatgccgttactgatgccgatattcagtttttgggtgctgtggggagtcaccacggttccaccaataatcagggtatccagggtatccattctttgtcctcctattgggtcttttgagctgcgtggctgtcgtcaataatatcctgacgcaagggtgtatgcacgtcaagtatggcggagccgtcttccaaagaacgggttgcatggatttcgttgtaaccgcagtaacagagattacctggaagcataatccgtttttcttccccgcactgcagctcaaacttacccctcagaacatacaccatttgctgatggctgttgtgacaatgcggttccacatatgcgcctttaggaaaaatcatttcgcaggccatgattttgtcaccatagccaagcattcgccttactacaccgtctgccatttcagttttcaaaatttcacttttttctacgaacattttaacgtcctttctgaatctgttggattccctaaaaataaaattgataaaacgatttatctaaaatatagcatatagcaaagatgaaataatgtcaacatgctataaaaataaatataagatataaaaaaagaggttaatattactaaaataatcgttgacaatcacaaaatatattgctattatcacagtaaaggaagataaaacattttattaatcccatataattttaacataacatattctgggggatgtacatatgaaaaaaggcatgacaattaaacagattgcggaagcggcgggcgtttccataggaaccgtatcccgcatcattaatcatcaaaatttcggatattcccaggaaacttataagcgggtacaggaaatcataggagaaactggttatatgccaaaccgggttgcaaggtccatgattactaagcgcagttttaccattggatacctggtggacgatataagcaaccccttctttcctgagatagccaagggcattaacagcgttgcttctgaaaagggattcaacctgctgctctgtgaaggcggcggtaatgcaaagacagcggaacaacatttaaagacactctataagtctggagtagacgggattatcaccggctcctatatactgagcgaggagaatatagactatcttctaaagattcagcttccctttgtgatactagatgctaatatgacggactctggtttctataacatcagtgtggataattacagtggggccaggactattatggattatctgattttaaagggccacaggaagattgcatgcattactggtcctatggagatggagagttccagaaagcgtcttaacggatacaaagcagtaatggctgaaaatgggctggactgggacgggatgattgtggaaggggattttactcaaaagggcggaatactggcagcaaaggaaatggaaggcagagactatacagctgtgtttgcgtttaacgacatgatggccattggcgtctgtaattatttgcatgagaatgggttcagagtgcccgaggatgtatcagttgtaggatttgatgatatttctatggctgcttatatgtttccgcccctcactactatgcatcagccactttttgagatgggtcagggtgcaatggagatgctcctttcagctatggaagacaaaacgtcgggtgagtacaaagaaaaaagatttgatttaacacttgtggagagaaaaagtgttgcggccccaagaatgaaagcgtaattggggcctgacagttccgctggagaagaagtttttgcggtcttttaataaaacgttttatcaattaatgtggatattctaatagaataataagcaaccggaatggagaccggtgtttgttatatataacaattgtttcttatgaaaaggaggaaaactatgaggaaaatgggaagaatgctggtggcagtattaacaatgtcggtcgctatgtcaacagccacgggctgtgccttgaaggcaaaggacgggtctgtgcaggcaacccaaggggaacaggctgctgcaaaaaatgacgggagtggagagaacagcaatggagagaacagcaatggtgaggacagcagcggcagacaggtaggggttacactgattgttaacggaacgattggggacaagtcctttaatgatctagcttacgcaggactcaggaaagcagaggaggactttggtataaaggggaccctggttgagaacaattatgataccaccaagtacgagccgtccatcattgagtttgctgaggatccggattgtgaccttattattgtcaatagtgcggacgtgaaggaaattattgagaaggtggcaccggattatccggataaacgatttgtgatatatgattccgatattgattattcggctgcggaccttaccaatgtgtattccactacttttaagcagaatgaagcttccttcctggcaggagccttgggggccaggatgacctcccttgaaggagatgatcatgtaaatcctgaaaaggtcattggatttgtggcaggcggtgataatgtcatcatcaatgattttcttctgggttatattgaggggtgtgaatatggtgatccagatgcccgtatgcttatttcctatatcggaaacttttccgatgcagctaaaggcaaggaaatgggtttatctcaggtaaatcagggagcagatgtgatatttcaggttgcagctggcgccggactgggggttttggaaggatgcaaggactccaatgtatatgcgattggcgtggacgatgaccagtataacttatttaaggatacggaccaggaccaggcagacgtcattttaacttcggtcatgaagagtgtggataactgcgtatacagctgtataaagcgccatgtggaaggaaaccttccctatggaacaacggaggctcttggtttgaaagagggaatggtatccattgcaaagaatgaaaattatgaggcacttgtacctgaagaaattcaggaatttatggagaatttggagaaaaaaattgtaaacggtgaggtggtggtaggcactaatataggggcagaaatatctgtaattgaggatgcaaaggacagaattaaaccttgatgaaagtataaggcatgctcctgctccagaggcaggagcatccaaggaaaatgtggaggcaggatatgttagacacattattagagatgcggggtattacaaaaatatactccaacgggttcgtagcaaacaaagatataaatttttccgtggcagaaggggaaattcatgcgcttatgggtgaaaacggtgcaggaaaatccacccttatgaaaattctgttcggaatagaaacaccagaagaaggcgaaatactgctaaatggaaagccgattaaaataaataacccattgacagccataaattatggaattggtatggttcatcagcattttatgctggtaccttcgcttactgtggcagagaatatggtacttggaatggaacccagcagcaaagggttgcttagcttaggtaaagcgtataagctggtggaagatattgcggcaaagtttcaatttgacattaacccaagggctaaggtggaggatataccggttgggacaaagcagaaggtggagattttaaaggccctgttaaggggggcgaagatactgattttggatgaacctacagcagtccttacaccccaggaaacaagggagttgtttgtacagttaaaacatctgaaggagatgggacataccattatatttatctcccataagcttcaggagattaaggaaatttgcgaccggattacaattctgcgattgggaaagtgcgtgggaacacgggaagtggcaggaataacagaacaggaaatgtctcggcttatggttggcagagacgttattctggatattgaaaagaagcccgccaagacaggtcgtgcagtattaaaggtaagtaatatccggcttaagaaaaatgcctccagatacatattgaataatgtcagctttagcgtgagagctggagaaatattaggtgttgcaggtgtagagggaaacggacagcgggaactgtctgatttaattacgggcttggaggagtttgaagagggggaaatcctgattaatggtcagaaaattagaaacaaaaaagtgggggaaatccgtaagttgggtgtttcacatatctcggaggaccgtatgacctttggtgcagtggcggatgcttctgtagaggaaaatctgatatcagaccggtttcaggagaaggagtataataaaggatttttatttgaccataaaaaaatcgctgagttaagcgataagctcatccggcagtacctgataaagtgtgacgacagggaccaggaggtgggcatgctatcaggagggaatatacaaaaggtggtagttgccagggaattttcgtcttcacccaagcttattatagccaatcagcctaccagaggaattgatgtaggggcaagtgagtttattcgaaacaaactagtagaactgcgtgacgagggtatggctgtcctcttgatatctgcggatttaaacgagattttggaggtgagtgacagcattattgtcatgaataatggggagattgtggcttatttacccgataataaagctgtcacggaaaatgagctgggcgagtacatgttgggagtaaagaagatgccggaagaagaagtacggagggtagcttatgagcaagaagaatattaatcctgtccgtgaggtagaacgggagtttggtgtcatacggccgctgattgcggttatgttttctatgatactgtgctttattatcattttcatagccagtgcagaaccgtttgaggcgctgaaacttctgatcacagggccattgtccaccgtaaggcgctttggaaatgttattgagacatggattccctttatgtttactggctgtgccatctgtattttgtattcagcaaatgttattaatatggcagcagagggagcctttttcctgggtggtgtagcagcctcttttgtggcaatccgttttgctcttcctccaggtatccatccgttggctgctattctggctggcggcgtggcggggtcaattgtatgcctgattcccgggtatttggaaatgaagtttgatgccaaggcggtggtttcatcgctgatgctcaactatgtatgtctgtatgtgggactctatgtaattaagtttgtattaagagacccccaggccggatttatcgcatcggaaaaattcatgcccactgccgtgctgtcaaagcttataaaaggaagcaatgtacatgcgggcatcttcatcgctgtgctggtggttgtattcagctatctgtatctctataagagcagatggggatattctgtgagaatcataggtaaaaatccattttttgcaaaatattccgggattagagtggctagcgtggtggtgtcctcccagattctaggcggttttattgcaggagccggtggaggtgtacaacttattggcatgtatgacaggttccagtatcaacagctgccccagtttggttttgacggtatccttatagccatcctggcaaaacaaaaccccaaatatgtacctctgacaggattttttttggcttatatcagaacaggggctgaaatcatgtcaagaaagacggatgttccatacgaaattgttcaggtggtccaggcgttgattattatgatgatggcggcccagttgttcctgcagaaatggaaacataagaaaattgtagctgcaaccaggaaggttctggaaatacagggggaggtatgatatgggtctgattcaaacaatattttcgccggcattcgggttttctgtgattcgcgttaccacccccattatatttgccgctcttgccgctcttataaccaacaaagctggagtaatgaatatagctttggagggaataatgctgatgtcggcgttttttggtactgtggtcagcgcatacacccagagcgctctatggggagtaatcgctgccgtggctgccggaataacagtggccatgattatggcgggatttgcttttcgtatgaaagcggatttgattcttacaggtattgcaatgaacacatttgcatcgggcgccacagtgtttcttatgtatgttgtctgcaacgacaaggcatccacctctagtcttcccagctgtaatgtacctaatatacagctgccatttatcagggatattccggtaataggagaggtgttgagcggtcataatttgctgacatatctgggatttctgagtgtcatagtggtatattttttgatttataagactcccttggggttgagaatacgtgccgtaggagaaaaacctgatgcggcccagtctgttggggtaaaggtaatacaggttcagtttgcggcactgttcttaagcggcgtttttgcagggcttgggggtgcatttatgtccatgggttatatgtcctttttctctagggacatgattgccggaagaggattcattgctctggcggctcagaatatgggaggggcggctccactggggacgctgattgcttctgtaatatttggtatagcggatgcgctttccaatatgcttcagaccctaagggtgccggcggaggcagtccaaatgcagccatatctgctgacaatagtggggttggtaatctattctgtaacaacaggacgcaagaaaaagaaatcagaataaatattagtggagggattgaggaatggataaaaagaaaattatactggacgtggataccggctcagatgatgctattgcaatcatgacagctgtgctgtcagatgagctggatgttctgggaatcacaacggtgaatgggaaccgtccggttatgaatactacagaaaatactctgagagtactggatttattaaagtcggacataccggtatatagaggctgtgaggaacccatggtggcgggattgatgcctgagcggcagcttttcaaaaagaccaatgataaaaaagaactgggggggaagactgttacatatcattatgaatttctggaggagttgccaccctcggtgagcaaggcacaggatatatctgccgtacagtatctgataaaggctcttaatgactcggacggggatattacaattatagctgtaggacccttgaccaatctgggggtggctatgagggcggatcctggcattattaataaaataaaaaaattaattatcatgggaggaggatgccgtcagactaatacaacgtctgctgccgaattcaacatatggaaagaccctgaggcagcccagattgtgttgacgtcaggatgtgaaattcttctggtgcctcttgatgccacgcacagggcatatgtggacagtgaggagagtatgaagttgcggcagataggaacccctgtaggtattgcaacagctgaccttctggacgcgaggatacaggcatatgatttgatgcagcctattgagtgtgctccatatggaagtactcccccccatgatgccttggctgtttgtgcggccattgatgaaactgttcttagggatgtcaggttatgccgggtggacgtggactgtggagggtcttgggcagacgggatgactatcgtagaccccagggtcttaacagaccagcctgaaaatgtacatgtggcctttaatgcagacagggaaaaatttgtaagcatgctgtttgacatattgggaaagaagaatcaggaggacagataaatatggataagaaaaaagtaattctggatgtggatacaggttctgatgatgccattgccataatattggccgtactacatccggatttggacgttttgggaatcactactgtaaatggtaataagccattgccgaataccaccgagaatacattaagggttattgaccttctgggggagggggaacatattcctgtatatatgggatgtgctgaccctatggttgcggagttgagcccggaacgccatgcagagagcaggcaggcaccacaaaaaatagaagttaatggggagattgtggagtatcatagtgaatatctggatatgcttcctccttctattacaaaggtacaggaaaaaagagcggtaccctatcttattgatacgcttatggcctctgagggagatattacactgattccggtaggtcctttgaccaatattgcagttgcaatgagggctgaaccgcgaatcaaggggaagattaagagaattgtaatcatgggaggcggtcatggaatctccaaccgaacctcggcggcggagtttaatatttggaaggatccggaggcagcccaaattgtactgacctctggctgtgatgttatgctggtaccgctggattccactcacgcaggggatgtgacactggaagaaagcaggaccataagaaaactgggaacacctgtggcagtggcagtggcagatctcctggaccagagaatcaaggcttacgatatgttccagccacaaaagattgccggttccactccgccccatgacgcactggttgtagcctctgtcattgatcctgacgtgttgaaagatgttcaattaaaaagggtggatgtggactttggcggaagtatctgcgacggaaggaccatggtggacagccgggtgtatccggacaatcctcctaatatacatattgcactggactgtgaccggcagaggtttgtaaagctgctgaccgatacaattgcgctgtctgtgaaagacggagagtgggatgagacgagggataaggcagtaattaaaagcaagtgaacgggaaggggatatctgtgtatgagagtaggcttgattggattgggaattatgggaaaacctatggctgaaaatatggtaagagcaggagtggacctgctcgtcagcgatttaaaccgaaattccgttgaggtagttgcaaatgcaggtgcacagccggcggtgaacaaggaaatcggtcaaagctgtgatgtagttatgaccatgttgcctaatagctctcatgtcaaggctgtaatgctgggagatgagggattggttaaatatatgaaggaggggacggtttttattgatatgagttccatcaaccccgtggccagtaaagaaatagcagcagaattggaaaaaaagggaattagtatgttagacgcgcctgtatccggaggagaacctaaagcaattgatggtacactgagctttatggtcggaggaaagcaggaagtgtttaataaatataaaccgcttttggagacaatgggcagttctgtagtacgttgtggggaagtgggagccggcaatactgcaaaacttgcaaaccagattattgtagcctgcaacattagggcggtagctgaggcatttactatggcaaagatggcaggggtggacccggctttagtttatgaagcaataaagggaggtttggctggaagtgccgtgctggatgccaaaggaactatgatgctggatggaaatgattatcccggttttaaaatcgacttacatataaaagatttgaataatgcgctggattgtgcccatacagtgggggcacccgtacccatgacggcagatgtgcaggaagtactgcagtggttgcacagtagcgggaacggtcagaaggaccacagcggcattataaagtattatgaacatttaacaggagtaaaactttaagctccaggagaatataggggcaattaaaagccagtgtgcaactatcttggtaattgcacactggcatatgttaatttatttcaccctatttttttagccaaagtatctcttcagcagaccctcaaatgccttgccgtggcgggcctcatccttagccatctcatgaacggtgtcatggattgcgtccaggttcagggcctttgctctcttagccaggtcaaacttgccggcggtagcgccgttctcagcggcaactctcatctccaggttcttcttggtggaggaggtaacaacctcgcctaacagctcagcaaacttggcagcatgctcagcttcctcaaaagcagccttggcccagtacatgccaatctcaggataaccttctctgtgggcaacccttgacatagccaggtacatgccgacctcggagcactcgccttcaaaattagctcttaaatccatcatgatatcttcaggggaaccctgagccacgccaacctcatgctcgcatgcccatgccattccctcggatgcctgctctttgaacttggaagccggaacaccgcactgtggacatttctcaggtgcattctctccctcgtaaacataaccgcaaactgtacatacccatttcttcataatcaatattctccttttcctttttataatgatggccaggagccggacaacagatgtccgggcatcctgacgagttgttgataatcaataatagtaattattactgatatcaatataaatcatttaggctggtttgtcaatagctttatcaacttttttttgtaaacagctgttgcaccgcccgtagaacagtacgtagtggctgtcgatgatgcccggcgcatgttcctgggcttccttattcaggtcctccatggcgcctaattccatgtcataaacctgattacactcgctgcacacaaaatggtaatgctgacgggtatctccatcaaagtgaacagcaccgtccccgcaggtcagctttcgtatctcgccggtctcagccagcagattcaggttacggtaaaccgttcccagactgatattgggaaattcttcacggatgctggcgtatagggcgtctgccgtaggatggtcgtgacgattcatcagacaggctttgatggattccctctgacggctatactttagagctttcatcgcatctccttctctatataaagataataataatagttactgtttatattttagcagaagatggatacactgtcaagggccgaaaaataccctgcatccatcttatgagggaagcagggtatctaatacatatatcaggtagaaagcattattttttagggggcatagtccagccgttcctttgcaatgcggatgaattcgtgggcggcccgggacatgtagcgccccttgtggtagccgattcccaggacgccgtgagcccgggtgtagtttaaggaatacaggttcaggtggttctgctccaggaccgcgctgcggtaggaatgggaggcagggtccggggacatgaacatcctgggataaaaggtgattcccatacccttgccgctgagagccagcacggtttcgatattttctgtttccagcacgatgcggggactcatctgggcgtcctcgaaaatctcatccgctatggtgcgcacacggttcccctttttaagcagtacaaaggggcagtgttccagaaggcggatatcagaggcggcgcggagtttttcttttatctcctccacctggccgggatatgcttttttcagtgtctcgtccgggaccaccataagaatctcttcattacaaatgggaactgtttccacattttccgctgtaaagggcagcaggtcaatcatcaggtcgatgtttccatggagcaggtctgaggccagctggctggaatttccctccgccagatgaagctcgatgcccggaaactgggactggtaggtgggcaggatttccggcagaatgactctgccgcgcgtatgggatactccgatggaaagctgtcctgtggagaaatcttttatatcggagatttccttgtaggtctcatcccgcaggtccaaaagctccctggccctggtctttagggcccttcccgcataggtaagggtcagaggggaggtgcggttgaagagaattacgtcaaattccttttccaggttggatatatggttgctcagggactgctgggagatgtagagcttcctggctgcacgggtaaagttgagctcctcggcagctaccaggaaatattccaggttcaggaaattaatcatgactcatttccccccgaagcgtttccctcctgtatggttcctgaccggtacaggtgcccgcagcgttcatcttcctgctgggccaggatggcggctgctttgggaagaaagccgcacagacggtcaagggacgtgttgactatcagctcctgcggaaagtccacttcctccagaagcgcgtgggcaaagccgtgattgcctgcgtctgcttcgcagtgggcatcgctgtttatgataatgctggtgccgtagtgtctgcacagttccagcatttttatataattatccctggctcccacgcggaagcttaatgggtttaaggagctgttgtttacctccagaagtttatggtgttccccggctgcagccacaagtgtgtcatagtctatggggaaacggctgtcatccggatgaccgataatatgaatcaggggatttttaagcgcccccaggtaagcgctggtattctgaagcgccgtgccgctgtggatacagggctggtgcaggctggctatggcatagtccaggggttccaggacgctctgttccaggtccacggttccgtcataatccataatattcagttccacgcccatcatcagcctgacgccgtaaagggtccttggcaggactttgaaattgatgaaatggaaggaatggcagctgccgggcatggcaggggcatggtcggagcatccaaacagggataatcctttgaccgaagccgagtgaaccatctcgtaaagggaattataggcatggccgctggctgttgtatgtgtgtgcaggtccagtaaatctatcatggaatgcaggtcctttctagcgtacattgagacattttagccgctgaatgcatcatatcatattttcaggacagtgaaaaggcgtaaaaagaggataaaaaataaaaaaggtataattttcgtcataaaactatagaaatattaggtgggttgttgttataatggtaaggaatatagtttggtaaaatgtacagaaggcgaggagagtaattatgagtgaagaactgaacaaagagctggagaatgaagtgacggaagaggtaaaggaggctgcacccatggagaccatggaggattacgcggctgaactggaggcttcctataagacactgaaccagaggcacatcgagattaccgaggaggagagcggcgcgggggcgaaatgggcccagttcgctcagatgatggaggacagaaccgttgtcaaggttaagattgccgaggcggtaaagggcggcgtggtcacatccctggaggaagtgcgcgcattcattccggcatcccagctgtctacagagtatgtggagaaactggaagactggcagggcaagtatgtggaggccgtcatcatcacggttgatccggagaagaagagactggtgctttccggacgcgaggtggagaaggagaaaaaggaagcgcagaaaaaggagcgcatggctcagttcaaggccggtgatgtggtggaaggcactgtggacagcattaagccttacggcgcgttcattaagctggacgacggcgtggacggactgcttcatatatcccagatcagcacccagagaatcaagcatcccagcgcagtcctgaccgagggacagaccgtaaaggttaagattctctcagcacaggagggcaagctgagcctgagtatgaaggttctggcagaacagcaggcagacaaagaagagcatgagacatttgactacaaggagaccggttcggtatccacagggttaggcgacctgttaaaagggcttaaactctaggcttaaggtaaggagggataggaatgaccaatatccccaaagcggacgaccaggttgaccaatggcgttcagtgatgtttctctatgattcagcactaaaaaaggtcaatacaaagattgaaatattaaacaacgagtttgcgaaccgttatgactataaccctatcgagcatatcaaatccagactgaaatcagctgaaagcattgtcatgaagcttaagaaggacggatacgaggtaaccattgagaatatgatggaatgcctcagcgatattgcgggtatcaggattatatgttcgttcacgtcggatatctaccagatagccggcatgatagcggctcagggggatgtgactgtccttcatgtaaaggactatatcaaaaaccccaagcccaacggatacaagagttatcatatggtagtaactgtgccggtctatctcacagatggaccggtggagaccaaggtggagattcaaattcgttccgttgccatggatttctgggccagtctggaacacaagattgcgtataagttcgagggcaatgccccggagaacctgctgaaggaactaaaggcctgcgccgatatggtggatatactggatgccaaaatgttttcacttaacgaggctatcacggcatttgccagggagcagaaagaaaggtcggaagaatcttaagtgaaccgattgataaaagagacagaccaggtaattaaactgaacctgcgccagctggtgatttttgaagtattgttccggctggttgcaggtacattctatatcaggctggtaaaccagctcttaaggttctcgttgcgcatggcaggatacagttatctgaccatgagtaatatgggggcctttcttctgcgcccggcaaccattgtctgcgccctgctggcagcggtgctggggatggtgcttatggtggtggaaatagggggccttatcactgcctaccaggctgcggcctattccatgcgggtggattccgtgtacattttaaaaggcgcgctgggcaaggcatgggatgcgtgtaaggggaggaactggaagcttctcccgctggctctggctgattatgtgatgatgaacagctatctgctgctcaggattctcacaaagataaagcccctgaattttgtcatgtatgaaatcatgcatgcgccggcggcacggctgggcctggtgatgctgacggcagccctggtgctcatagggatacctactatgctggtgttttttgcctgtatgattgagcagaagcagtttcgcgacggtttcagaaggagcatggagcttttaaagggacgcagcctcagggcagtagtcctgctgctggttgtgaattttgggctggctgtggggctggttctcatgtacgtggtcattgtggtggtatctgccgtgattgtcaccctgtttgtggacagctatgcggccatggctgtgctggcagctgtttgtactaaactggaagtggtagtgctgttcattggagggatattggctcccctggtggactttggggctctgaccgtgatatattaccagtatggaatgaaaagcgcgcatgcagcgccctgggattttaccatgccttatgagctgcattttaagagaaaatggatactgaccataacaggggcgctggcgggagccagcctgtttcttatattcgatatggtatacaacggcacatcccctgactgggatgtgctggggcagacagaggtgacggcccacaggggaagctcccggatggctccggagaataccatggcagccattgaggcggccatggaagaaatggcggattacagtgagattgatgtacagacaactgcggacggaattgtggtggtgtgccacgacctgaaccttaagcgggtggcaggggtggaccgcaggctgggtaccatgacctatgaccaggtaagctggctggatgtgggaagccatttcagctccaggtttgccggggagcggatacccaccctggaagaagtgctggaagcctgcaaaggccgtatgaagctgaacattgagcttaagaatataggaaatagttccagtctgccggagcaggtggctgccctggtacgggaatacggtatggaggaccagtgtgtcatcacgtcggttaagctgggatatctggagcgggtaaaggagatggctcctgagctgaggacaggatacattctggcggctgcctacggaacgtattatgacaatgagtatattgattttatcagcatccgttccagctttgtgggaaggaagctggtggaagcagcccatgaaaagggcaaggcggtccatgtgtggaccgtgaacagcaaaactgagatagaacaaatgaaactgttaggcgtggacaatatcatcacagattatccggtgcgggccagggagatactctacagggaggaaaccaccgagacgcttatggaatatctgaaaatgatgctgagataaaaggagataatagcatatgagagcagtggtacagcgggtgacgcaggccagcgtcactgtggatggagaattattgggaagaattggtaaggggtttctgatactattgggagtggcggacggagacacccggcagatggctgagaagatggcggataagatttgccgtctgcggatatttgaggacgaaaatggaaaaactaacctatcactggaggatgtggagggtgaacttctggtggtcagccagtttaccctgtacgcggactgccgcaagggaaacaggcccagctttataaaggcaggcgctccccagatggcggagtccctgtacaaacattttatggagaggtgcaggacccatgtggatgtggtggagaagggacggtttggagcagacatgaaggtggagcttctcaatgacggaccctttaccctgatgcttgacagccaggagctgtttggagagtaggaaacagaagaaccggcggcgggaaagcggcgcgcaacatggtgcggtaaggggctgtaaacaggccctgttgaaaggagatggcaggacatggcgaagatgatggagactgtactgtactataatccgggcagaccggagacaatgaagcatgtggctatgatgaaaagcgtgctggtccgcatgggcgtgcgcataaggaacataggaccggaacaagtcctggaaaaggttggatatcttgccggaatggaaggctatgaggctgcgggaggcagcgccggggcagacggagccggggcacaaggagctgatggggagagaaccggagccggaccgggtgagcttccggttataccggaggaggtcatggtattaaaacagttttcaagccagagactggacatgctgctggcaggactgcgcagggccggcgtgcccaggattgccctgaaggcagttctgacagaacataacagtgactggaccttctaccatctgtaccaggaattaaaggaagaacatgagaccatgacggcagggcagcagccatgacagaccctaccaggaaaaggcagctggaggaactggaccaggtgacattgtgcgccaggattctcttacaggccagaagtgagctgtatgtgaacatgaagtttctggatgtgtctctcagcagtctgggctttgaggctgactgggctagagagggactggggacggacgggcatctgatttactatgggccggattatctgctgggcctttataaaaggggcaggacgctggtaaaccgcgggtatctccatatgctgttccactgcctgttctgccatatgtatacacgaaaggacagggacaagggctattgggacctgtcctgcgacatagccatggagtacgtcattgacggactataccaaaaatgtgtccatgtgccgaggagtgcccttaggagagaaatatatctcagacttgagaaggctctgtcggaaagaggtcctgtcctgacggctgagcgggtttacagggcccttttggagatggagcttccggaacgccgcctggacatgctgaaggcggaattctttgtggacagccatgatctgtgggagcaggaggacagtcctaaaatcgcccggtccaggcagaacaagtggaatgataaccgggagaagatgcagacggagctggaaaccggttcaaaggatgcgtctgaggataaccggagcctgctggaggaggttcaggtggaaaaccgggagaggtacgattacagccggttccttcaaaagtttgcggttctgaaggaagaaatgcaggtggatccggattcatttgactatgcgttttatacctacggactgtccctgtacggcaatatgcccctcattgagccgctggagtccagagaggtttaccgggtagaggattttgccattgtcatcgacacgtccatgtcctgctccggggagctggtgaggcggttcctggaagagacttacgacgtgctgtctgagactgagagctattttaagaaggtccatttacacattatacagtgtgatgacgcggtgcagtcagacgtgctggtcacaagccaggaggaactgaaggcttatatggatgatttccagattagaggaagcgggggaacggatttcagaccggcatttgaatatgtgaacgggcttaagaaaagccgtcaggcagcctctctcaaggggcttatttatttcacggacggcaagggaatctatccggttcaggccccttcctacgacacggcctttgtgtttattgagaatatgttttccgatgaatccgtgcctccctgggctatgaaagtggtgctggaggaggaacagctcatggagtacaggccgggcagcaggaacagagatacggaggcggaccagaaccgcaggaacggggaaatgccggcagaccaggacagcaggaacagacatggacaatagaaacagggatggattgcctatcccacagagcaggagaacaggacatgaatattaagcgggctaaggaagaaataaaggataccattgaagcataccttttaaaggatgagaatggggagtatgtcataccatccatccggcagaggccggtgctgcttatcggtccacctggagtgggaaagacccagataatggagcagatatccagggaatgcagggtcgggctgatatcctataccatcacccatcacaccagacagagcgcggtgggccttcccttcatcgagaaaaaaatgtatggggacagtgagtatgcggtgacggagtataccatgagcgagattgtggcctccatctataaccggatggaggaaacaggacttaaggaaggaattctctttatagatgaaatcaactgcgtatccgaaaccctggctccgactatgctgcaatttctccagtgcaagacctttggaagccataagatacctgagggatggattatagcagctgccggcaatccgccggagtataacaagtcggtaagggaattcgatgtggtcaccctggaccggattaagcggattgacgtggaaccggatttggcagtgtggaaggaatatgcatatgctgagaatatccatccggccattatatcctatctcagcatcaagggacagaatttctgccagatagagacaaccgtggacggaaagctgttcgccaccccaaggggctgggaggatttatcccagctgctcctggtatatgagagcctgggaaaaagagctgacagggatgtgatcagccagtatatccagcaccccagaattgcaaaggattttgccaattatctggagctgtattataaatatcagaatgagtatcaggtggatgagattttgcagggcaccatacgggaggcgctgtgcgaccgggtagccagggcgccctttgatgagcgtctcagcgttacaggtctgattttgtccaggctgaccgaaggatttaagaaactgtgggataaaaatgcttccatggaacttctgatggagcagcttaagagataccgccaggagatggacggcagggccaagacctctgcaaacagcgcggcggcgcaatcccaatcacctgccatggctttgtcctgcctggctcaggagctggagaaggagcgccttcacaggaagaaaagcggactgtcaggaaggcgggaggaccgcctgtggctgcgtgtgcgaatcatgctggaggaatatgcccagcagatgagaaaggaagctgttgaggacagagagcaggcctgggaatgggtgcgcagaaaattcatggagcacagcgactgctatgaggccatgaaggaggattgcggcagccgcctggaacatgcctttgacttcatggaagctgcctttggaaccggccaggaaatggtcatatttgtcacggagctgaataccagcgaggcgtgtgtgcggttcctggatgaatatgagtgtgaacgctattaccagtacaataaggacctgctttttgatgaacaggagcaggccataaggcagaagctgtgatgaaatagacagaagctttgatgaaatgtgcagtgaaatacaaaagagcgcgtctgcggctcattctttccatggttggtttaaccgtgggaggattgagcgtcagacacgctcctgttttttattttaactgctgacaatctttaactgaaaatcaatattttactaccttcgtctcattgtacacgtcccggtccaggtcgcccagcttgctggatacaagcatgcctaccatgacatcaacgtcaacgttcataagtgttctgaacattcctgagaaccagtcaataccaataagaatagcgatactttccaacggcagccccagtgaggaggcaaggaaggtatacacgattacggaaccgcccggcacaacgatagttcccatgcacatcaaacatgaaagcaggatggccattcccatttgataggtggtcagctggattccggtggactgtgccataaagaagattgcagccacataacacagggctgcgccgcagctgttcatggacatggtaatgggtccggtaaaatctgcaaccttacggcttacgccgaactttacaaccgcatcttccatcttggttggaaggcagattgcgcctgaggttgtggtaacggccatcatggacattttagcgaatttcttaggcatctttgcaggatttactttacagagagcagctgtcagcggaccataaataaggaactggattgcgtctcccagcaacaatactcccaggaatttaatcataggaataataaccttgaaaccggtggagccagcaacgtttgccaacagacagaaaattccgattggtgcaacatgcatgacagcctttatgatgttggtaataatggtgttaaaaccggttacccattcaaccatgttcctgttgccgctctggcgtgtatatgtacccatggctgtgccaaaaaacaatgcgaaaacaatacatggaaccatagcgctgtcagccatggagccgatgatatttgtggatacaaagcctaacagcgtgtcctgaagcgatgctgtttcagcggaggcattggcaatggcctctgcgttggcgatttcgataccgatgccgggctgtatgagcatggacagaacaacacccagtcctgctgatattaaagtgaaaaagataatccacttaaatgtgtggaaccccatctttcctacatcctggccgtctccgcttcccaccgcgcctgccactgcagtcattaccagcagtacaaccgacatctggattaaccggataaaaatatcaccgataaattttaaatttgaggcccatggcccaatcagagatccaaagacaataccgcctgctgtagcgattagaatttgtgttgtcagagacaacccttttttctttccctccattgtttcccccttttcttttcccttctttttctttcttgtgctgattcctgtactaacatttcgtttcacgttcccatgtcctgtatgcttatattttaaggcacaaagctgtttgaaacaatgacggcaacttggaaagattttttaatttttttatctaaagtgtataatgggacgcaaaaacacagttgatcttgttgtgctataaaccaataaatataatagactggcaaaaaacgactgtcaaaatgacaaaggcttcagccgctgttttttagccgaagctccatagttaatatgagaatgtaatataagccggtaaagaagggaatgataaaccggatatagaatatggccgcaataagaatttggccggacatagaatacacatgatgggaggaattgttttggcaaatgatgggcagaaaaaaagcatggtcctgaaagccttggataccgtggagcgggtggggaacaggctgcctgacccggcagtgattttcctgattctgacgggaattgtcatccttgtgtccgccctgtgcggattcctggaattgtctgtcacatatgattttctggaccgcacaagcggtgagattactaaaacgacagtggaggccgtaagccttctggcgccggacagcatccggtatatggtcaccgcggtggtgcctaatttcacgggattttttgcgctgggaactgtttttaccattatgataggcgtaggggtggcggacggtacgggcttcatgtctgccctgctgcgcagggtggcttcctccacgccaaagtcattagccaccgccgtggtggtgtttcttggaatcatgtccaacattgcctcatccacaggctatgtggtcctggtcccgctgggcgcggtcctgttcacggcctttggacgtcacccggcggccgggctggcggcagcctttgcaggtgtatccggaggctggagcgccaatcttttaatcggcaccaatgaccccatgttcgcaggcatgtccacccaggcagcccgcatgattgacccggaatatacagtgcttcccgtctgcaactggtatttcatggtggcatccacggtgcttatcacagtcataggcacccttgtcacggacaggctggtggagccccgcctggggccttgggggcctgtggagacagggaccattggggatatcggggaaaatgaaaggagaggaatgggctgggccggcatcacggtgttggtatatgcggcggttatggctcttttgacggttctgcccgaaggactgctgcgggatccccaaacccattcactcctcaattccccatttatggacggcatcatcttctttatgatgctcctgttcctgctccccggtctggcctacggtatcggagcgggcaccctgaagaacagcagggacgcggtggctcttgtgaataagtccataagcggcctggcaggctttatggtgctgattttctttgcggcccagttcacagcctgttttaactattccaacctgggcaccattatttccgtcaaaggggcggatttcctccaatccgtggggcttacgggacttcctttaatcgtctgctttatcctgctgacagcaggtatcaatatcttcatagcggtggattccgctaaatgggccatcatggcgccgatttttgtccccatgttcatgcgtctgggtctttcaccggagctgacccaggcagcgtacaggattggggattccagtaccaatatcattgctcccctgatgccctttttcgtattgacggtggcgtttttccagaaatacgataaggacgccggaatcgggagcgtaatctccaccatgcttccgtattcaggggcttttttgctgggatggattgtgatgttcactgtctggtatctgacaggtctgccgctggggccgggatcgcccctgttttacgggctgtagtttcaggaagcctggggatttgtggaaagcggcaggggagactgtttgattgtctgatatttttgggtaaattacagattgacggggaatggcggggggagtaggattttttaagaaaacatcccccatcgtgccgtatgaaggtgagcgggatacaaaggatggtatatgtaagatggaacaaaatggagccggagtccgtatgtttaccaaccaggatttgaagcgccttatactgccccttattgtggagcagatattggctgtgtccgtgggaatggtggataccatgatggtatcaaacgcaggggaggcagctacctccggggtttccctggtggatatggtcaacaccctgttcatcaatatttttgcggcggtggcaaccggaggcgcggtggtgtcctcccagtatctgggacagaggagaagggacagggcctgccagtcggccaaccagctgattttgataactgcatgtatttcacttattataatggtgctctgcatcctgtttcgccggggggtgctgcatctgctctacggcggcgtggccggggatgtgatggccaatgccctggtttacctgaccatatccgcactgtcctaccccttcctggccgtgtataattcctgcgccgccctgttccgctccatgggaaattccaagatatccatgcaggcgtccatcatcatgaacattatcaatgttataggggactccctgttcatctttgtattccattggggtgtggcgggtgctgctgcggcttccctgatttcacgtatgactgcctgttttatccttctcttccggctgaaaaataagaatctggacatctttattgggggaaaatggaatcttaatttcagaatggtgaagcagatactgggcataggcattcccaatgggattgagaacagcatcttccagctgggccgggttctggtggtggggatcatagccatgttcggcacgacccagatagctgccaacgccattgccaataatctggacgggatgggcgtactgcccgggcaggccatgaacctggctatgattaccgtggtagggcgctgcgtgggggcaggcgattttgaccaggccggatattatgcaaaaaaaatgatgaaaattacatacttagtcaacgggctttgctgtatagccgttatattgactatgccgctttctctcagtctatatggactgtcaaaagaagcattggaactgggagccgtactggtgctgattcatgatgggtgcgcagtgtttttatggccgtcctccttctgtctggccaatgtgctgagggctgccagcgatgtgaagttccccatgtgcgtatccatcctgtccatgctcctgttccgcataggcttcagctatgtgctggcagtgggactgggcatgggagccgtgggcgtgtggtgggccatgattgcggactggagtgtccgatccgccttctttggatggcggtttgccagcgggaaatggaaaaccttttatcatgccctgtaattttgggaaaaataagaatgcattgtcttttgggcagcgccggaccggtttggtgaaaccggagggcgccgcctgtttctgtatataaatggaaaacgggataaaataactatacgggaattgaggtttatgttactattagacatataagaacggatgggagatgaccgatatgaagataacgtatatccatcacagcagttttatggcggagcttgaccatgccgtacttctgtttgactattttgaaggaaacattccggaaacagacagggagaagcctttgtttgtgtttgccagccaccgccatggagaccatttttcccgttccatatttgatttggaggaaagccgcgggaatgtgacctatgtgctgtccgacgatatctggacaaggcaggtgccggaggaccttctgggcagaaccatattcctgggaccaggggaggaagtgagcctgaaggacggagccgggaatccggtggacatccgggcatttaagtccacagaccagggtgtggcctttttggccagcctggagggcaggaccatttaccatgcaggggatttaaacaattgggtatgggaaggggagccggaggccgacaaccgcaggatgagtgagaatttccaccgggaaatggacaagctggcaggacgccatattgatgtggcctttatgctcattgaccccaggcaggagaaggatttttacctgggaatggatgactttatgagaatggtgggggcggacgtggtgtttcccatgcatttctgggaggactttcaggcggctgccagatttaaggccctggcctgcgccgacgggtacaaggacaggatacaggagatacacagacggggagaggaattcctggtgtgacaggcggacggcgggagacgggcttttcggtctgcaccggacatggatttgtgaaacagacgggattaaagaaaggaacagattatgattttgattcgcgcaggacgggtactgggacccgcagaagggctggatataaaggcggatgtggttttggacggagacaggattgccgggatatttccggcggaccaggggggagcagagggagcacccggctttagcacccgggagaggcagtatgagcagataatcgaggcagagggactggcggcagcgccgggactggtggatgtccatgtgcattttcgcgatccggggcccacgtacaaggaggacatccatacaggggcaagggctgcagcaaagggcggcttcaccacggtcgtgtgcatggccaataccaaccccattgtggataacgaggagaccctgcgctatgtgctggaggagggaaaaaagacaggcatccatgtgttaagctgcgccgctgtgtcaaagggatttgcaggcagggagctgaccgacatggagggacttctggcagccggggcagccggatttacagatgacgggattccgctgatggaggggacgtttgtcagggaggccatggaggaagcggccagattggatacggttctcagcttccatgaggaggacaagcattttatcagggaaaatggaatcaaccacggcaggatttccgatgaactgggaatctacggctcaccagccctggcagaggattccctggtggccagggactgcatgatagccctggatacaggggcaaccgtggacatccagcatatcagttcagggcactccgtggagatggtgcgcctggccaaggagttgggggcaaaggtatgggccgaggtgacgccccaccattttaccctgacagaggaagccgtgttaaagcacggaaccctggctaagatgaacccgccgttaaggacagagaaggacaggcagatgctgattgaggggcttaaggatgggaccattgacatgattgccacagaccatgctccccacagccgggaggaaaaggatcggcccctgacccaggcgcccagcggcatactgggactggagactgccctggccctgggaatcaccaatctggtgaagccgggacatctcacgcttttggagcttatggaaaagatgagctataatccggccaggctctataagctggactgcggacgcatggaagcaggagcgcctgcggatctggtgcttttcgatgcggacaggcagtggacggtggaaggctttgaatccaagtcatccaacagccccttcctgggcgccacattgacaggcaaggtaatgtatacggtttgcaaaggaaggattgtctatggagatcagggaacggaagtttgatgtgattcttctggatgtggacggaacgcttttggattttggcatgtctgagaagcagggcatgaaggtggtccttgagcagtatggatttgagcccacagaggaacggcttttgctgtaccatgaaatcaatgagggattctggtccgcctttgagcggggagaagtgaccaaggaagatttggtacggcagaggtttgagacgttttttggccgtctgggcagggcggtggacggccgtgaggcggaggaactgtaccgcaggcagctggacgcgtccgcatttttgattgacggggccctggagctgtgcgcctatctgaaggacaggtatgatttatatgtggttaccaacgggacatcgtccacccagtacaagcggctggctgcctccggcctggacggctttatgaaggatatttttgtgtccgaggacgcggggagccagaaaccgcagaaggaatattttgattactgcttttccaggataccggatgccaatccgcggcgtatgctgctcattggtgattcacctgcgtccgatatcaaaggcggaatggccgcaggcacgtatacgtgctggtataaccccggcggacagacgctacctgagggcatacgggcggattatgaagtggggagccttaaggagcttatgaatcttttgcaggctcctgttctgccctgaattttggggagggggacagcggcgcggatctttgtcagttttgccatataaaatgtcctttacacaaacgctttagtgtgctaatatgatagcgtgtcaaaagaccgtgaggagccgctggacttgaaacagcggaataagaggaggacgtttattatgaaaaagagactttttagcctggcccttgcatctgtgatggcattatccctggcaggatgcggcggttcaaaggaagcagccacagaggcagagacaaaggcagaaacagagcagacagcagcagacacttctgccaaggctgaggataccaccgcgcaggaggagacaaaagcagagagcgaagccgcgtcagaggctgtttcagaaagcgccggaggaacattgatagtaggatttgaccaggatttcccgcccatgggattcatgggggacaacggtgaatatacaggatttgacctggagctggccaaggaagtggcagagcgtctgggactggaatatacggcacagcccattgcctgggattccaaggacatggagctggaggcaggcaatatcgactgtatctggaacggatttaccatgacagggcgtgaggacgactatacatggtcagagccgtacatggccaacacccaggtatttgttgtggctaaggattccggtatagccagccaggcagacctggcaggcaagattgtggagtgccaggtggattcctctgcagaggcagcgttaaaggaggtcccggacctgacggctaccttcaagcagctgcttaccacggctgattataactcggctttcatggatttggagcagggcgcggtggacgccattgccatggacgtaatcgtggccggatatcagattcagcagagaaacgctgacttcattatcctggaggacagcctgtccgcagaggagtacggagttggattcaagaagggcaacacggagcttcgcgacaaggtacaggccaccctggaagagatggctgcggacggcacgcttaagtccgtatccgagaagtggtttggcgaggacgtaactacgattggcaagtaataaaggccgctgtctggacctgctgtcctgccggataatccggcggcagcttgtttaacagcggctttatacggcataaatgttaaaggcaggtaagaagttatgggtaaaatgacaatccagcagatgttgattcagttggcaggaggtatgggaaccagtatccagatattcctggtgacgcttatcttttccctccctctgggccttttggtggcctttgggcgtatgtccaaaaaccggctgctccaggccgttatcaaggtatacatatccatcatgagaggcacgcccctgatgctgcagcttatggtggtgtatttcggaccctattacctgttccacatcaaggtgggcagcggctaccggctgtgggccaccttcattggatttgtgatcaactatgctgcctattttgctgaaatctacagaagcggcatccagtccatgcctgtgggccagtacgaggcggctcagattctgggctacagccggttccagaccttcttcaaaatcatactgccccaggtcatcaaacggattcttccgtctgtgaccaacgaggtcatcaccctggtcaaggacacctccctggcctttaccctcagcgtggcggagatgttttccatagccaaggcccttgcggcgtcccagaccaatatgattccctttgtggcggccggtctgttctactacattttcaacctggtagtggcagttgggatggagtgggttgagaagaagatggattattaccgttaggaacaggaggattgtggattatgaagctgctggaattaaatcatgtggaaaagtcatttgacggcctgggcgtcataaaggatatatccctcagtgtggaggagggggaaatcgtttctgtcatcggtccctcgggttcgggaaaatccaccctgctgcggtgcgccaccatgctggagaccatggacagcggggaagtgatatacctgggaaagcgggcggcctggacagaggacggaagggctgtgtacgcctcaaaaaaggatttaaaggaaatccagagccagtacggcctggtgttccagaatttcaacctgttcccccattactctgttatgaagaacatcacggatgctcccatccatgtgcagaaaagggataaggcgcaggtctatgaggaagccagggcactgcttaaaaagatggggctggaggacaaggaaaatgcgtatccgtgccagctgtccggcggccagtgccagcgcgtggccattgccagggcattggcgctgaatcccaagatactgttttttgacgaacccacctcagccctggacccggagctcaccggtgaggttctcaaggtgattaagtccctggcagaccttgacatcgccatggtgattgttactcatgagatggcctttgcaagggatatatcggaccgcgtggtattcatggcgggcggtgtcattgtggaggagggcaccccggagcaggtgtttgcttcggataatgagaggacccagagctttttggggcggtatggggctttgctgaattagttttaaacaaaatggtatactcagccagatatgataaaaggcatccaggaccatgacaacatggcagggatgcctttttttcgatgccgggcttatggcccaggaacaggtggttattttgttagtaccattttcaggccgtatattttatttgacagtagtatgctatacttttagaatcaacattatacagcagtcggaaaggagaaaagagatgtttaaattaggcgcaattacagtggggcagtctccaaggacagacgtgacagatgacattatggggatattccaggggaaggttgaaattctggaacggggggctttggatggcctgacggtggaggatatagacaaactggccccggatgcgggggagtatgtcctggtctcccggatgcgggacggcagccaggtttcgttttccgagcagaagatcctgcctcgtatccaggagtgtatcgaacagctggaggcagagggagtcaagatgattctgttcttttgtacgggtgagtttgactataaattcaaatcccgggttcctcttatattcccctgcgaccttataagccggctgattcctgttctctgcggggacagacagctgattgtggtgacacccacccagagacaggtacaacagtcccaggaaaaatggaggaaatatgtaaacgacgtggtgacggtggcggcttccccgtacgggggatgggaggaaatagaacaggcatgcagaaagatcagcgcacttcaggggcctctggttgtcatggactgcatcggatattcctttgccatgaagcgggaggttgcagaaaaaacagggaagacagtggtcctttcccgcaccatggcggcccgggtgatatcggaattgtcagatatctgagaccggactgtgagctgagaaaaggcaaaaaggcaaaaatgtatgcacgtcaaggacataagtgtatacaaagacgacaaaaacagaaagaatcatgcataatgcatattaaaaaacttaaatatcatgcatgatgcaattgtaaggatagtgcagttttgatatgatgattaaaataaataatttagattctggatgaggacacatgaatatcatggataacaggtatacccttacaagggccggagaattaagcgatgagctgatctccatacgaaggaaaattcatcaaaaccctgaaattggatttgaccttccggaaacaactgcccttgtggcagagaaattaaaggcatatggaattgaattcaagaaagtaggaaaagcgggaatcagcgcggttcttggtaacgctgaagcgggcgggaaaacatttcttctgagagctgatatggacgcccttccctttgaggaattgaccggtctcacgtttgcttccaataacggctgtatgcatgcctgcggtcatgacattcataccagtgcccttctgggagctgccaggatattaaaagagcgggaaggcgagctgagaggaagggtcaagctgatgttccagccctgcgaggaagatgtgggcggagctgccgacatggttgaggcaggcgttcttgaaaatccttccgtggacggcgccatggccctgcatgtggtccatcacagtatgggcagtgtgggatacagtaccggagcggcttgtgcgtccagtgatgtgttcacaatcaccatacacggggagggcggacatggggctgttccggacagctgcattgaccctatcaacgcagccgtacatatccatatggccctgcaggccttaaacagccgggaaacccatcccgatgaaatgctggtactgacaatctgcgaattccattcaggagccgcagccaatgtattttccgatacggcagttatgcgcggcaccatccgcaccaggaaccagaaggtgcgggaatatgccaggagacgtctggaggaaatatcgtcaacagtggcatccgcttttggggcatctgcccgggtggaatatctctattccggtgtcccgcctatggtaaatgaccaggagcttctggaagaggcagcgggatatattgaccgcctgctgggaccgggaacctgttatgaactgccaaggatgactggttcggaggacttttcggtactgtcacagcttgtgcccagtgtgcttttctgggtcggaaccggttcgcaggaggaaggatatccttacggggtgcacaatcccaaagtcacattcagcgaggacatgataccggtaatgtcggccatctatgcagaggttgccatatgctggttaaataatcatccgaattgaagatataaaacgatagttaaaggggactatgttttgctttgactatcgttttttttataaaattttacaaaagggcagcaaaaacaaaaaaagagaggagtaataacttatgaaaaaaagatggatggtaagcctgatggcagtggcaatggccgtatccatggcagcgtgcggcaaaagttcggggggcggcacagaaaatgcaggcagcagcgcgcccgcagggaccacggcagcggaagcgggggccagcggggagacacagaccgctgatgccggtgagccggtggacggcggggtactgacaatatcactttcctcatcgcctaaaaatctggatcctgtgaaatatacaggtacatatgaatcacagattatcggaagcgtatgtgacacactggtggagtataacagcagcctgactgagatcatgccctctatcgcggcttcctgggaggtcagcgatgatggaaaagagtataccttcaagctgagggatgatgtgtatttccagccgggacagtatcaggacggcaggcaggtaacggcagaggatatcaagtattccctggagcgttctcatgagctgtctgctatgaacaggctggacatgttggatcactgtgaagtgataagcgatacggaagtgaaatgtgtcctggaaaatcccaacgcggtattccttactgcccttaccgatgcgggcaatgtaattgtccccaaagaggaagtggagggatggggagatgatttcggaacccatctggtaggaagcggtccatttgcgctgaaggaattcaagctggaccagcaggccaccctggtgagaaatgaaaagtactgggcacagaagcctcacctggacggggtggtattccgtcctgtcagcgacggaaaccaggcagtgaatgccctgaggaccggagaggtcaatgtggctaccagccttacgggagaggccgtgcaggtggcaagggatgatgacaccgtcaagcttttggagatgccggggcttcatgtatcctacctgtactttaacatggtaaatgggcctaccaaggatccgaaggtccgcgaagccctgatcaaggctgtaaacgtggaggaactgacaggcggcgtgtaccagtatggcgaggctgtgcctgcatcccttccgctgcctccgggctcctggggatacgacgaggctgtaaaggcagaggttccaacctatgatccggaagcagccaaggcgcttctggcagaggcaggttatccggacggatttgatttgaacctgtatatttccaatacgcctaccagggttaagatggcaaccctgttccaggcatacctgcagcagaacctgaacgtgaatgtaaacattaataccagtgagtggggaaccttcagcgagattggcgcttccggacaggcagatgtgtttggtatgtcatggacatggtatccggatccctacttcttcttaaacaagctgttctacagcggagaaatcggttccctgggcaacggccagggttacaataatcctgaggttgataaatgcctggagaacgccctgctgacaacagaccagaatgagcgcgcagacctgtacaagaaggcgttagccctgatcgtgaaggatatgcccggtatattctatgccaatgagaatgtggagtggggtgtgacgcccaatgtccagggactggtccagagggctgacggcaaggtaaagatctgtacaaccgatattaacgtatggctttcaaagtaaggttcgcaagcaacggtattatatcagtaccggcttgatggaaccggcaccggggatgccgtcttatggcggcattcctgtctcaaaaggagtttggtgacatctatgttaaagactttaattaaccgatgcctgcagatcataccggccctgtttgtggtggtgaccctgaccttcgtacttacgaggatgattccgggtgacccggcccgggccgtggcaggtccccaggcttccgtgcaggacgtggaaaagctgcgggaaagcatggggcttaacgaaccaatgctggttcagtacaaagactatgtcctcggcgttttgcagggggacttcgggacatcctattcctacaaccagccggtcttaaagcttgtggcggagaggatacccaatacacttctgctggcaattccctccatagcggttgcgcttttgataggcatggtgattggtgtggtcagcgcggtaaagcagggttctctgtttgattacatatttatgatacttgcactgattggggtttccatgcctattttctggatgggccttatgctggtactgaccttcagcgtccggcttgggtggcttccggccctgggcatgggaacctttgaaaacggcctgggggatgtgatacgccacatggtccttccctgtttctgtctgtccaccataccaatggcaacctttgccagaatcacccgttccagtatcctggaatccatttcaagcgattccatacgggccatcagagccagaggaatcagggacgccattgttatatggaagtacgctttaaagagtgcccttcctcccatcgtcacagtccttggccttcagctggcatcctgttttgcaggcgccatcctgacggaaaacgtgttttcctggcccggcatgggatcactgatggtgggcgccattgacaaccgtgattatatgctgattcagggcgctgttcttgtaatcgcgctggcatttgtcctggtaaatctggcggtagatattgtatacatgctgatcaatccaagagtcagctacgaagggggtagctaaatgaaaaagacagatatagccgcatcccaaccgtcttacgaggagatcctcaggaaggaacggagggccaacagcgcctggaataagctgagacggaataagacagctatgattggactgttcatcattgtgattatgaccgccattgctgtatttgccccgttcatcacagggggaaagcccaatgagatacatcccattgacgcatatctgggcttctttgagaaggggcacctgttcggcacggatgaagccggaagggatttgtttacaagaatatgctatggggccagggtctctcttctggttgcagtgggagccacggtactgggaggtgtcatcggggtggccctgggacttatatcgggttacgccggcggcgtggtggatgcggtcattatgcgctgcatggacggcgtcatggcatttcctttcatcctgctgtccattatccttatgacggtactgggggatggtatattcaatgtgatcctggcaatcggaattgcggttgtaccgcgcttttccagggtggtcagaggccaggtgctcatagtgaaaaaggaggagtactgcaatgcaggcagggtcatcggcatttccaataccaggatgctgcttcaccatatactgcccaatacagtgagtgaggtcattgtgtatgctacccttaacactgccagcgcaatcatatcagaggcatccttaagcttccttggactgggcatcaagctgcccacagcttcctggggaagtattctgaggtcgggaagggactgcctgaacacggcgccccatatcgcaggtatctcaggctgctttattttgctgacagttatcggctttaatctgctgggagacggtatacgcgatgtactggatcccaagatgaggaggtagccatgagagaagaattgaaaagacaggtcgggacgtgtatagaccgatgttccggggagcttacggagctggcagataccatctggaacaatccggaatataattttaaagagtataaggcatgccggtccattaccggactgcttgagaagcacggttttgaggtggagcggggaaccggcgggattgagacagcatttcatgcattttgtgattccggaaagccgggacctcatattgcgttcctggcggagtacgacgctgtgccaggaatgggccacgcgtgcggccataacctgatggcggccatgtcggccggagcagggattgccgtgaagtccgtgctgcctcagcttaagggcagtatttccgtattcgggacaccggccgaggagggcggcggaggaaaggtcatcatgcttgaaaatggggcatttaacggggtggacgcggctatgataatccattccgccaatgagacagtggtgaatgatatctcatactccaggacagacatcatcgtggactttttcggaaagggagcccatgccgctacctggcctgaggagggcgtcagcgccctggatccccttcttctgctgttccagcatatcagccagatgaggcttcgctggaatgggcagggaactattttaggtatcatatccgaaggcggagaggaccccatccacattccggaacactgccaggggaagtttacagtgcgctcgttcagcatgaagaccaagaagaagctcctgggagattttctggaggcctgcgaggccgcagccaggatgaccggtactacctggcagtggaaggaagacggctacacatatgaggacatacgcaacaatccggttatagaggacgtcctggcagagcaatttacccggctgggagaaacggtaatgccaagaagaaaggaactgggaatcggatgtacggatgtgggtaatctgacccatgcctttccggccctccaatcctatgtccaggtggttcccctgctccggggacacacaaaggaattcgaagatgcctgcaaaagtccggacggacacagggcggccctgactggcgccaaggcacttgccatgactgcggtggagcttttatccgacgacagccttatggaacaggtggacagggcctttcaggatatgaagaagcagtatgaatgagaggtgaggatatggaaggacagaaattattgacagtaaaagacttgaagacgtacttctatacctccggcggagtcagcaaagccgtggacggagtcagctttgaggtggaaaagggagaaatcctgggcattgtgggcgagtcaggttcaggcaagagcgttacgtccagctccatcatccatctcctgccggccaagacaggaaaaatcgtgggcgggtccattgattttaatggtacggatgtccttaagctgagccagaaggaactgctggaattcagggggaaggacatatccatgatcttccagaaccctatgacatccctgtcgccggtctttaaggtggggagccagatggtggagatgatatgcgcccaccagaaggtcaccaaggcagaggccaggaacatggcagaggaggcgctgaaacgggttgggattcccgatgccggacggcggatggaggcgtatccgtacgagctgtcgggaggtatgtgccagagggttatcatagccatgtccgtgtgcagcaaaccgcagatgatcattgcggatgaacccaccacggccctggatgtgacggtccaggcacaggtactggatttattaaaggaactgcgcgacaaatacggcacagccatcctgctgattacccataatctgggagttgtatgggatatgtgtgacagcgtgattgttatgtacgcgggcaagacagtggagtatgctccctgtattgatttatacaatcatccccttcatccttatacatgggggcttttggactgtatgcccagactgagcagcaattctaaggaggaactgtccacaatcgcaggcacaccgcctgatttgaggcttaccggggtaggctgcaactttgccaacagatgcccttacgcgcaggagcggtgcaggacggaggtgccggagctgacagaagtatcgccaggccaccgtgttgcctgccaccggcagacaggcggaaacaggcttgtcagaaatgaggtgacggaaagtggaagataggaaagtgatattgaagattgaacatctgtgcaaggattttgacataaaagcaaagtcttttaccggcaaggccttaaagctgcacgccctttccgacatcagcctggatatctacgagggtgagaccctgggtatcatcggtgagtcaggctgcggcaagtccactctgggacgctgcctggtcaacctccatcccatcacatcaggaaagctggtttatgacggaaaagagctgaaccgtctcaggaagaaagagcgccaggccctgagccgggagatacagatggtatttcaggatccctattcttccctggacccccgccatacggccgcggattccgtggaggaacccatgattgtccacaagacgcctgccactgccagggaacgccaggaaaggaccataggcctgttcaaggaagtgggacttgatatgcagcatttaaaccgatatccccatgagttttctgggggacagcgccaaaggctgaacattgccagggccattgccagtaatcccagagtggtcatctgcgatgaaccggtatcggctcttgacgtgtccatacaggcccaggtcattaacctgtttaagaagctgcaaaagcattttaaccttacatatattttcatatcccatgacctgagcgtggtgaaatatatcagcgaccgcatcgccatcatgtatctgggacggctggtggaactgtgtgacagtgactctatctaccacaatcccctgcatccgtatacccaggcacttttgtccgccattccgccggaatccccggaggaggaaaaggaacgcattgtgctgaccggtgaggtacccagcccaattggggaacagaagggatgccctcttgcaaaccgctgtccacggtgtatgaagcggtgcagggaggcactgccgaaactgctgccccacggggacacggaccacatggtagcctgttttctatatcagaacgaacgcgactgacggaggaaaaaatgagaaaagaaaatttaatcagcatggtggaagatcggaaagatgaactgattgacctggtttcccggcttatcaggattaacagtgagaatcccacaggaacccagagggaagtggtggattttgttgagaaatatctggagaaggccggcattgcctatgaggaaaccggggaaaacccggattatccctgcgtggtggccaggatgggcagcgatgacggctacagcctgatttttaacggacatgtggatgtagtcccggcgggagaccgagggttatgggattttgatcctttctgcggtacggtcactgacagccagatattgggtaggggaacctccgacatgaaggccggggtggccggagtcctttttgccatggctctgttaaaagagtccaatgtctgccttaagggaaatatacggcttcacattgtttccgacgaggagagcggcggggagtacggctctgcgtggctgtgtgagcacggatacgccaagggagcaaacggatgcctggtggcggaacccacctccatggctaccattgagattggccagaaggggggaatgctgctgacaatccgggcccatggcaaggcggcccacggaagtcttgggaattataagggagagaatgcaatccttaagatggcaaaggtccttccgctggtagaaaagcttaccaggataagcgggcatttttcagacaggcagttaaagcctctggcagactcaaagatgatagcggaggataagaatgagattccgggtttgggaagtgtcatagatcatgtaaccaccaatatcggactgatacaggggggaacccgccacaatatggtgccggactgctgcgaggcagtggttgactgccgtctgcccataggtgtcagccaggatgagattgctgcctgcgtggaggagatacgcagggagagcggagtggatggggttgattttgagctgaattaccgctccgagccaaactttacggatcacgaggatccattggtccttgcggtaaagaagaatgtggaggcatttttaggtactcaggtggtgcctgcttaccagtgggcttccagcgacgccagggattaccggcgtcagggtattcccacgatccagttcgggccgtccaatacagtggggatccactcttacaatgagacagtggagatagaagatgtggtgactgccgccaaggcatatgtggcagcggtgtgcgatttaatgggaattgaataaataccaggaggagatatgtcgtgttaatcaaacagttattggaagtgtatgatgttctggatgacagcaatgccagcggagaaacggttgaggcatacttaagaggaatcaggaaggatgcggatatccacgtatatccgctcgttgggccaaagggaaaaaccgatatggtcaaagtcaggattcacggaagcaggggaaagacgtccggaggagatgcgcccacactggggcttttgggacgcctgggaggattgggagcaaggccggagcgaatcggattcgtgtctgacggcgacggcgccctggtggcattatccctggctgcaaagctcttggatatgcagaataagggcgacatactggagggtgacatcattgtatccactcatgtgtgtcccgacgcgcctacaaggccccacaagccggtggcatttatggattcacctgtggagatggcccaggtcaacaaggaagagctgagtgatgagcttgacgcggtcctgtctgttgacactaccaaggggaaccggattatcaacacaaggggattcgccatatcacctacggttaaggagggatatattctgaaggtgtctgagtccgttctggacattatgcagaccaccaccgggcggctcccctatgtatatgccctgtctgtccaggatattacaccctatggcaatgatctgtatcatttaaacagcatcctgcagcctgcaacgggaacaaaggcgccggttatcggagtagccatcaccacagaggtgccggtggctggatgtgctaccggagccacccatatcacggactgtgaggaggccgccagatttatgctggaggtagcaaaagcttatgcaagaggggaatgcagcttttacgatgaggacgagtttacaagaatcaggaagctgtatgggaatatgaaccacctccagacattaggcaaagaagcatagcaggcttatgttatgtttccctgagcagatcgtaggcgcacagtcccagatagaagctgaagatttcgtccatggcttccaaatcggtgcctagtatacgctttatcagattcagatggtctgccagggtattgcggtggatgaagagctgtctggaggtctcgcggatgaccatacggttttccaggtacatgcgcagggtgtggaccaggcaggttccgtttgcctggtcgtaatccaccagccggacgatggtgtcgttatatattttattcaggtcgtgatggttcaggttcctcaggagatgatagggaatctgacgcagataggaagccacagccttttggggattgaggtgggactgcatattgatggagattaagctttcctcaaatgcggtgccgattgtcaccaaacggctgtggcttctgctgacccctccccgcacccactggcgcaggctctcatccaaagattggtacaggtattccgctgtcatctgtgcctggttcactgcctccaggttggagatgcttttctggaagaacagaaatacaatcacataatcattgtaaaaactcaggaagtactgctgtcccgaattttccagagcagtgctgaatttatcgtataccgtgcgcatcagccgttccgggcttcccgtctgctggatttcgtaggcaatgcagacacgcttgcagtcatagggaaaggagtaggtattgcacactatccttatttcttcgctggacttggaacgcatgtccgacagcatggagaaaaaaggagcaaagtggttggtggaggaaaaacgcctctgattcacctgaatggtctcaagctcggttgacaggatgggaagacagtttgtgatgatagagactatgtcatccgaaaggggggcagcgttaatgtcagcgcagaggtaatacctgccgctggggataggaaaaacggcaaagggtatgatttgtttgttgatccagaacctgcgcgtattggaagcctccttatcgctgtcagcctccttgccgctctctgcattcttggatttatcgggccggatcactacacggctggaggtttgcaggagattggcataggaatccggaatatggaaatacacggatttgtcattatagtcggttatcagaatgatggaatccgtgtaggaggacagcatggacagcatggagctgattccgctgttgctggtgaaaagctggcaaaatttgcgggtttcattgatgacaaaggcctggttggagagctgcctcagttccagttcacggaatatgacacgcataatatcagagtaactgtggtagaagggaactgcaatcagaggaaggcggtacctggccgcttcttctatgagaaactgggggatggtgtcgtaaaaacgttttatttttatgcacagcgcggtgcagctgacatcgtggagctcctttagcagcttttttgtcagtgcaatgtctttataaaaaataaagccggtcgtcaggaccagttcgttttttttaatccaggggacgccttccggattgtcaattacgttgactccggtaatgggatttcccagacagtcctcatctccgaagaattccagattatcaatttcagggcagtttaaaaaccatcgcagcgtcagcacagggtcattcataaacggggctacctcctttcaatcttctaaaatattatagcatctggtactggctgttacaagaaagtttttcccaaggaagtttgggctaaagaagtccggggcatacttacaaaaaaggaaggtactgccatggaactgtcacccgcagccagacgtctggtcatactcctgtgtctccggcatctgcccgggattctgggcatgggattgtccggagtactggttatgataccgggaaaattaagggaatctttattgaaattaacaggatatgatgataagcttcataggtaatctgatataagacgggaggaattgcaatatgaagaaacattcattgatgataacagcagccgctctggctgcggcgatggtgctgggaacgggctgtgccaaaaaaccggcggtggagacatctgagacagttaccagccaggcttcggctgaggagaccaccaaagcgcctgagacaacggccaaggcacaggagacaacggagcaggcggctgaggcaaaggaagtataccatatgcttcagggcaccgttacaaaggtgacagcggacggttcggtgttcacccttcaggcggacgacggcagggactatgatatcagccagtccgacatccgggacgtggaggtggagattgaggaggatgtgcagatagccattgcatatataggagagcccctgggcagcctggaggacgtgaccctggtggtggcccttccggaacaggaagagtggagtattctcactgagaaaggaaccaccacggctaacgcgatgagcagctttaccataaagacagacgacggccaggagttaagcttcttaaaggataactgccccatagaggaaggggccctggcaggtgacagcggggataaggtgactgtgacctatgtgaattcccagggagtaaactatccggtggagattaaaggaacgaaatagacaggctgccgccacaattttgcgaaaaacccttgcaaaataagtgttttccctgtacaatctgatattgagtaaacagcgtgagaggggccgtacatgacccctcttttactagaaatatcagcagataccagaaatatcagcggaacagattaagaagaacagattaagagaaaggtaacgaacatgattagtacaagcaacatatctcttcgcgtgggcaagaaggcattgtttgaggatgtgaatatcaaattcaccgagggcaactgctatggactcatcggcgcaaacggtgccggaaagtccacattccttaagatcctgtcaggccagttggagcctaccagcggcgatgtcatcatcactcccggacagaggctgtccttcctgcagcaggaccactttaagtatgaccagtacacggtcctggatacggtcatcatgggcaataagagactgtatgagataatgaaggaaaaggaagccatctacatgaaggaggacttcacggacgaggacggcatcaaggccgctgagttagagggtgaattcgccaacatgaacggatgggaggcagagtcagatgctgaaagccttttaaacggacttggtattgagccggacctgcactatgcgcagatgggatcccttctgggcgcccagaaggtaaaggtacttctggcccaggccctgttcggcaaccccgacatcctgcttctggatgagcctaccaaccacctggacctggatgccattgcgtggctggaggagtttttgattaactttgagaatacagttatcgtggtatcccatgaccgttatttcctgaataaagtctgcacccagatagctgacattgactacggaaaaatccagctgttcgcaggaaactacgacttctgggtagagtccagccagctgattgtgaagcagatgaaggaagccaaccgcaagaaggaagagaagattaaggagctccaggaatttatccagcgcttctccgccaatgcgtccaagtccaagcaggccacttcccgtaagcgcgcccttgagaagattgagctggacgacatccgtccttccagccgtaagtatccgtacattgatttccgtcctttccgcgagattggcaatgaggtcctgaccgtggagcacttaagcaagaccattgacggcgaaaagatactggacgatatctccttcattctgggccgcgaggacaaggttgccctggtaggaccaaatgagcgggccaagaccgtgctctttaagattctgtccggtgagatggagccggatgagggtagctataagtggggtcttaccacctcgcaggcttatttccccaaggataacagcgccgagtttgacaacgacgacactatcgtagagtggctgacccagtattctcctgagaaggacgtaacctatgtccgcggtttcctgggacgcatgctgtttgccggcgaggacggagtaaagaaggtgaaggttctttccggaggtgagaaggtgcgctgcatgctgtccaagatgatgatatccggcgccaatgtgctgatgttggatgagcctacggaccacctggacatggagtctatcgacgctctgaaccgcggtatgattaagttcccgggcgtgatgattttctcctcccgtgaccaccagattgtgcagactactgcaaaccgtatcatggaaatcattaacggcaagctggttgataagattaccacctatgacgagtaccttgaaagcgacgagatggcacgtaagagatttaccttcacactgactgagagtgaagaggcagatgattaatatagtggcagtgacagggcggcaggatggataaatcctgccccttttcagtcattttatgagtatggagcggattaagaggaggacagatatggaaaaaattacaagttttaccattgaccacaataagctgcagcctggagtctatgtatccaggaaggaccaggtggaagggggaatggtgaccacctttgacctgcggatgacctcgcccaatgaggagccggtgatgaacaccgcagaaatgcataccattgagcatctgggggcaacctttttaaggaatcacggcacctttggcaaaaagtgcatttacttcggacccatggggtgcaggaccggtttctatctgcttctggcaggggattaccagtccgcggatatcctgcccctgatggtggaaatgtatgagtttatcagggattttcagggggaggtgcccggggcgtcgccaaaggactgcggcaattatctggatatgaatttgggcatggccagatacctggccgggaagtacctggaagtactgtaccatgtggaccagttcccggaatccaggctggtatatccggagtaggcagctgtttgaaaacgacacaggaacataccggaaacccattcccggaccatgttccggagaggagccataaagaatgactaagttgatttcgtggaatgtaaacggcctcagggcctgcgtaggtaaaggctttctggattttttcagggaagcggaggcagatgtattttgtatacaggaaagcaagcttcaggaggggcagattgaactggacctgcccggctatcaccagtactggaactacgccaggaaaaagggatattccggcacagccatgttcacgaaagaggaacccgtgtccgtgtcctatggcatcggcatggaggaacacgataccgaggggcgtgtgattacggcagagtttcctgaatattatgtggtgacctgctatacccccaattcacaggacggcctggctaggctggattacaggatgaagtgggaggacgatttcctggcataccttaagaaactggaggaaaacaagcctgtggtattctgcggggatctgaatgtggcccacaaggagattgaccttaagaatcccaagacaaacaggaaaaatgccggctttaccgatgaggagaggggcaagttcacagaccttctggcagcaggctttgtggacacgttccgctatttctatccggacctggaggggacttactcctggtggtcctaccgtttcagcgccagggccaagaatgcagggtggcgcattgactatttttgtgtatcagaaagccttaaggacagactggtaagcgcatccatccacaatacggttatgggttcagaccattgcccggtggagctggtgattgaataagaggaaaagacgatgaatctggttaccattgaacatttgacaaaatcatatacggagaggctgctgtttgacgacacgtccttctccatcaacgagggggagaagattgggctgattggcgtcaacggcacgggcaagtccactctccttaagattgtcgcggggctggaagatgcggacagcggcagcgtggtaaggggccgcagcctctacatacgctatctgtcccagatcccggaattcgcggagggggatacggtgcttgaaagcgttatgcgggaaaatgccggggaaacccactacagttctgcggacgagatgcaggccacggccaagagcatgcttaacaagctgggtatcatagaacacgatgccctgacatccaccctttccggcggacagagaaagagggtggccttagccagtgtgcttatgagtacagcggaccttctgatactggacgagcctaccaaccatctggacagcggtatggctgactggctggaggaatatctgaaagccttccggggcgccctgctgatgattacccatgaccggtacttcctggacagcgtggtgggacgcattgtggagctggacaagggaaagctctacagctaccaggctaattatgagggcttccttgccctgaaggcggagcgcatggagatggccgaggcatcggagcgtaaacggcagaccattctgcgcaatgagattgcctggatgcagcggggagccagggcccgttccaccaagcagaaggcccatatacagcggtatgaggagcttcgggaccagaaggggccggaatatgaccgcaacgtggagctggaatccatagccagccggttaggcaggaccacggtggaggtgaaggatctgtgcaaggcttacggggacaaggtgctgatgaaggatttcacctacattttcctgaaaaatgaccgtgtgggtatcatcggccccaacggaagcggaaagtccaccctgatgaagatgctggcaggctgggtggaaccggattccggcaccatccagataggacagaccgtgaagatggggtatttttcccaggaaaatgaggccatggatgaaagccttaaggttatcgactatattaaaaatgcggctgagtacgtaaagacaaaggacggcagtatcagcgccagccagatgttagagcggtttttattcccctccggtatgcagtatacctccataggccgcttatcaggcggggagaggcggaggctttacctgctgcgtatccttatggaggcgcctaatgtgatactgttggacgagcccaccaatgacctggatatccagacactgaccatattggaggactatctggatacatttccgggcatagttatagccgtatcccatgaccggtatttcctggaccgcgttgtgaaccgaatctttgcctttgagggacagggaaaggtgacccagtatgagggcggatttacggattatcagattgcctggtccgccagacatccccaggagacaggggagcagaagggcgtaagagccggagacagtgatgaaaacgggtccggcctccccataaaccggaataactggaagcaggccgcaggcggcgaaaagaagcgcaagctttcctttaaggaacagcgggaatgggaaaccattgaggcggatatcgcggctctggaacagtccatcggagatttggagcaggagattggaaaatccgccaccaactataccaggctcaatgagctgatggaggaaaagtccgccagggaagcacagctggaggagaagatggagcgctggatgtatcttaacgagctggtggagcagatagaggcgcagaaataacagcaggcacagtatgggagctggttatcagacgggttgtatttttctgataaccagttctttttgtgcataaaaagatgacgatttctgccagggagtgttgatttattgacaaaatatcgaattaactatatacttttcttatcgtgcttatgacagtttcaaatagaaaatccacttaaaaacagttgttgataattcagaaacagtggtcttgggaaaggcggtaacagctatgatgaagggattccggatagacaggaatgatggaaggatatatgcgatgggagtgactgctgtctccggaggggtgcatttttctttcccctctaagggagagacctgcgccgttattttatataggaaaggggccaaaagccccaagggtagaatcgaatttccggtaaatgccagaacaggggatgtgtggagcatgactgtgctgggagacttttccggcctggagtacgtgtacgaggtagacggacagcagatgccggacccttacgggaggaagtttacgggcatggagcgctggggaagcctggcgcgccgggacaagccggtccgcacgccggtggatacagaagggggcgcgtacgactgggaggatgatatcctaccctgcatcccttatgaccagtgtgtgatttaccatattcataccaggggatttaccaaacatgcctcctccggcctggaaggagacagcaggggaacctttaagggcgtggcggagaagataccctatctcaaagacctggggatcaccactgtggagatgatgcccccggtggagtttgaggagttaattataccggagcgtgtggacggaagtccttttgcagctgaagaaccggacggaaagctgaattactggggatataccagagggtattattttgcgcctaagtgtgcctacagcagcggacctgtgagggagcctgaacgagagtttaaggatatggtgaaggccctccacagggcaggactggaactggttctggaattattctttgacgggaaggaagcgccctcctatgtgctggatgtggtccgcttctgggctcaggaataccacgtggacggcgtccggctggtgggctatgcgcctgtgaagcttttgggcgaggatccgtacctcagcaggctgaagctgttggcgcccgggtgggacggtgtggagccggggcaggaaaaacatctggctgaatataatgacgggttcatgatggatatgcgaagctttctgaagggggatgaggaccagcttaaccgtctggtataccacatccgtcataatcccggccaggtgggcgttgtcaactacatggctaataccaatggctttaccctgatggacatggtgtcctatgacacaaagcacaatgaggccaacggggaggagaaccgggacggaacagactacaaccagtcctggaactgcggagtggaaggccccagcagaaagaaacgcatcatgcagatgcgcaggaaacagatacgcaatgccctgctcatgctgtttttaagccagggaactcctttgcttatgatgggggacgaatttggccggaccaagaagggaaacaacaactcctactgccaggacaatgatatatcatggcttaactggggcctgctgaaatccaacagcagcctccatgaatttgtaaagcatgtaattcaattcagaaaggagcactccgtgttccatatggagaaggagccggccctgatggattaccgttccgtggggctgccggacgtgtcctaccacggccttaagacctggtgtcccatgtttgaccgtttcctccgccagctgggtatattatactgcggaaaatacggtaaaaagccggacggaagggaggacgactacttctacgttgcgtttaacatgcactgggaaccacatgagtttgcccttcccaacctgccgaaggattataagtggcatacggcctttaatacggacgaggaccaggtgaacggcatgtatcccgggggcagtgaaccggttctggagaaccagaagtccataatgattatggcaaggaccatcgtggttctcatgggaaaggaggttcccgcgcagaagaaagcctccaggggaaaggcagcgggaaaaggcgaaagaaaggaagaggaagcagatgatactgtcagaggaaatgatacggtatatagagaaccacaggcaggaggcttacagccttcttctggagctggccaggataccggcgccctccaaccatgaagagaggcgggctgaattctgtctgaactggcttaagtcccagggcgccaggggcgtatatattgaccaggcccttaatgtggtgtatccggcggatgtaagccaggacaggccgttggatgtgttcatggcccatatggatgtggtgttttccgatgagacagaacttcccttaagggtagaggacggacgcatctattgtcccggcgtgggagacgacacggcatgtctggtatgtcttctgctggcagggaaatatatagcccggcatgtggattctcccagttggagggaaatccggggggaggatgcccccggacttctgctggtgtgcaatgcaggggaagaaggtctgggaaacctgaagggagtgcgtaagatctgcgaggactacggcggcaggataaagagcttttgtacctttgacagttctctttccagcatcgtggacagggcggtgggttccaagcgcttccgggtaaaggtccgcacccggggcggtcattcctacaatgactttggcaatgataatgccatagcgggactggcgtccctggtggggaagctttataaaatccaggtgccggagggcggaaagacaacctataatgtaggtatgatatcaggagggacatcggttaataccattgcccaggaagccgagatgctgtacgagttccgttccgacaaaagggagaacctggaatatatggaacggcagttcatggaggtacttgaccgtgcaaaggcagaggggatggacgtgtctttccaggttataggagtcaggccctgcgaaggccaggtggacccggcacaaaaacaggccctgacagactgggcccaccgggtggttgaagaaatgaccggacaggcgcccaaacaccatgccggctccacggactgcaatatcccgctgtctttggggattccaagcgtgtgcgtgggaagcttccgcggcgcaggggcccataccagggaggaatatgtggagacagattccctggaggaaggctataaggtggcattcggtatgattttcggaagaagggattgattttaaggacaggcggtaaagctttctcgccccggctgtgtacggccggtcataatgattcttactaattcatagatttagagtgggtactcttatggagtgctcccggtaacagcgtatgcatgcgcttccgggagcatttttatatctgttcacgcggcgtccggcggataccggggaagcagacgcacattagcgcaggctcataagaaccatgaattaggtaagaggggagagacagatggcagattggtttgaacagccggaggcagaggtgttagccgggctggactccggaaggcagggaattgacagcgggcaggcggagcagcgtcttaaggaatatggggaaaatgtattggaggaggcaggacggctccagtggtggcaggtatttcttgcgcagtttaaggaccttttggtcattatcctgatcggggcggccgcagtgtccatgctcacaggggatccggagagcgccatggtcatatttgcggtcctgctgctaaatgcagtgctgggaacggtccagcaccagaaggcggaaaaatccctggacagcttaaagcggctttcctcgcctgaagccagggtcctgcgggacgggcgcagcatgaccataccgtccgccctggttgtaccgggggatatcctgctgctggagaccggcgatatggtggccgcggacggacggctgctggaggtgtacgggctgaccgtcaatgagagctcccttacaggggaatccctgggggtggagaaacacaccggggcggtgaaggcgcgggagggaaccgtggcattggccgaccggaccaacatggtattttccggttccctggtgacctcaggccgtgccgtggcagcggtaacagccacgggaatgaatacggaaatcggtaagatagctgtgctgatgaacggaaccaaggaacaaaagaccccgcttcaggtaagcctggaccggttctccggacatctggccattgccatcatagccatctgcggcctggtgtttttgctcagcctgtaccgccgggaaccggtgctggatgccctgatgtttgccgtggccctggcagtggcagccataccggaggcgctcagctccatcgtcaccattgtccaggccatgggcacccagaaaatggcaagggaacaagctatcataaaagatttgaaggcggtggagagcctgggatgcgtctctgttatctgttccgataagacgggaaccctgacacagaaccgcatggatgtggagcaggtgtacgtcaaccacacgcagcagcagccgtcatggctggaaaatgaaaagagaaggagcgatgtcaggctcctgcttatgggggcggttcttaataacaacgcctccggccaggacggggaccccatggagacagcgctgtttaacatggcaagggaggcagggcttatcccggaacaggttcggctccagagtcccagaaagggggagattccctttgactcccgccgcaagcttatgactaccgtaaatgagatagaaggacacgatatcgtctttgtcaagggagccgtggatgtgcttctgaaaaaatgcacccgcctggctaatccggccgccggccaggggacagggttagctggtcagaggccgggggaatccggccagaggccagaggcagccataccctgccgtaccttgtcgtcctcggaccgtcagaggatactggaccagaacagccgctggtctgccagggggctccgggtcctggcttttgcatgccgtcctttcaatgaggagggaaaggagcacggtaattccggcttagccggggcaaaagcagggaacagtcaggaacgctcatccctgtcaggaaggctggaggataatctggtgtttctggggctcactgccatgatggatccgcccaggccagaatcgcgccaggcagtggccagcgccaggcaggcaggcatacgtcctgtgatgatcacaggggaccataaagtgaccgccatgtccatagcagagcggatcggcatatttacgccgggcaacatggcggtgacaggggcggagctggaccagatggaagaggaggatttgaaccggagtctggaacacatttcagtctatgccagggtatcgccggagcacaagatacgtattgtcaaggcatggcagaaccggggacacattgtggcaatgaccggagacggtgtcaatgacgccccggcccttaagaaggccgatatcggcgtggccatgggaatcacgggaaccgaggtgtccaaggatgcggcgtccatgatattggcggacgacaattttgccaccatcataaaggcagtatccaacggcaggaatgtgtacagaaatataaagaactccatccagttccttttgtcaggcaacatggcaggcattttctgcgtattatacacatcccttctgtccctgcccctgccctttaaaccggtgcatctgctgtttatcaaccttataacggattccctgccggccattgccatagggatggaaccgccggaggaaggtctgttaaaggagcctcccagaaatccaaaggagggcatcctcacggcgtcctttatacgggatatcctggtccagggagccctgattgcggcagccaccatgtgggcctataccaccggacttcatgagggcggtgcgggaagggcctgtaccatggcattttccacccttaccctggcccggctgttccacggattcaactgccgcagcagccattccatcatacgtctggggctgggaagcaacctgtacagcgttatggcgttccagctgggcgtggttcttctggcagcggtgctctttgtgccgggccttcaaatcatgtttgccgcagccgatttaagcctgagccagcttaccaccctggcggcggccgctttcctgcccactctggcaatccagatacataagatactccgggagtctatttattaggcagaagggctctgacagggggaagggcgatttctgaaataatggcaaaatcgtagaaaaattcggaaaaatgtgatagagtaaacatgagatacacgtaatggtataagcaggagggcattatgagactagttacatatgaaatcgaacacaaatccggacttggagtcatcagcagggacggaagctgggtctatccccttgcttccctggatatggattataagaccatgcaggagctgatagagaacatcagcgagtcggagaaacagctgctggagtatgtgtccggccaggacccatataaggtcaggggggctgcccctattggggaggtaagccttttagccccgattccccaccctcggcaggatgttatctgcctgggaatcaattacatggctcacgctgaggaatcggccagatttaagaaggaagcatttgacggggaaaggccccatgccatctatttttccaagcgggtaaaccgtgccacggatcccggggcaggcatcccaagccacagggatattgtaacggatttggattacgaggcagagctggcagtcatcatcggccgcgaggcatcccatgtcagggaggaagatgtaaaggactatatattcggatatactatcatcaatgacgtcagcgccaggaccctgcagacacggcataagcagtggtatttcggcaaggggctggacggctttctgcccatgggaccatgcatagccactgtggatgaattgtcctatccgcccaaagtacaggtacagtccagggtgaacggcgaacttcgccaggacagtaatacggagctgctcatatttgatatcagtcacattgtaagcgaactttcccagggcatgaccttaaagccaggaaccattattgccacgggaaccccggcaggagtgggcatgggctttgacccgccgaaattcctggttccgggagatgtggtggagtgtaccatagaagggataggtaccatcgcaaacaaagtgacagactgaaaggagacagatgaaaatggattatttacctatgacaatacgcagacagaagaacattgccctgattgcccacgaccagaagaaacgggaactgatacagtggtgcggggaacataaggatatactgtccaggcatttcctgtgcgggaccggcacaacggcccgtatgattacggatgcaaccaacctgcctgtaaaggggtataacagcggccccttgggcggcgaccagcagattggggccaagattgtggagggaaaaattgattttgtgattttcttttccgatccgctgacagcgcagccccatgatccggatgttaaggctttgttaaggattgcccaggtgtatgatattcccattgcaaataacaaggccagcgcggatttcatgattacttctccccttatggatgaagaatacgagcatgatgtggttaatttcagacagaatattgctgacagggcaaataccctttagaagtaggatatacagcaggcatgctgatatcagaccgaagaatgaataaacttacaagggggcaatcatatggaacagaaattatacgatttgatggactgggcagggattgaagaactggtgtattcggaagcatccaatccccatgccatgctgggaccccatctgacagaggatggacttctgattcaggcgctggtacccactgcggctgaaatcagtgtgaagatttccaccaccgggaagaaatatcccatggagctggcggacgaggctggttttttcgcggccctgatacaacgcaagagcaagacgccctataccctggaggtcacctatgacaacggggtgacggaggaactctgtgatccctattcatttgctccccagtaccgggaagaagacctgaagaaatttgcagcgggcatccactatacaatttatgagaaaatgggcgcccatcccatgaccattgacggggtatccggcgtgtacttttccgtgtgggcgccatgcgccatgcgcgtcagcgtggtgggggatttcaacctttgggatggaagacgccatcagatgcgccgcctgggcgaaggggacggcagcgtgttcgagctgttcattcccggtctgtatgaaggtgagatatataagtacgagataaagacaagggcaggggagcctatgctgaaggctgatccctatgcaaactacgcagagctgcgtcccaacaatgcctctattgtatgggatattgataaatacaaatggaacgacaagtcatggatggatcagagggcaaagaccgatacaaaggacaagcccatgaacatatatgaggtccatctgggctcctggatccgtaaggagactgtcagggatgagacaggacaggacctggcgggttccgaattttataattaccgggagctggctccaaggctggcggaatacgtaaaggatatgggatacacccatgtggagctcatgcctgtgatggagcatcctctggatgaatcctgggggtatcaggtaacagggtattatgcccctaccagccgttacggtgcccctgaggatttcatgtactttatggactatatgcacggacagggaatcggcgtcatacttgactgggtgccggcccatttcccaagggatgcctatggaatggctgtgtttgacggcacctgcgtctatgaacacatggaccccaggaagggctcccatccccattggggcactctgatatacaattacggccgtcccggcgtaaccaattttctgattgccaatgcgctgttctgggcggacaagtaccatgcggacggaatcaggatggatgcggtagcttccatgctctatctggactatgggaagaatgacggtgaatgggtgcctaatatatacggaggcaatgagaatctggaggcaatggagttcctgaagcatctgaattccgtattcaagggccgaaaggacggcacggtcatcatcgcggaggagtccactgcatggccaatgattacaggcgatccgaaagagggcggcctgggatttaactataagtggaacatgggctggatgaatgattttaccaactacatgcggtgcgaccctcttttcaggaaaaacaattatggggagctgacattttccatgctgtatgcctacagcgaggattttgtgctggtattctcccacgatgaggtggttcacggcaagggttccatgattggcaagatgccgggtgagaccctggaaaagaaggccgagaatctgagggctgcctatgcctttatgatggggcatcccggcaagaagctgctgttcatgggccaggaatacgcccagacggctgaatggaatgagggcgcgtccctggagtggggacttttggagtatcctgtccacaagaacatgcaggattatgtgaaggcgcttaacagactgtaccgtgagcacccggctctgtatgagatggattatgatcccgatggttttgagtggattaattgcagttaccagaatgagagcatgattatattcctgcgaaagagcaggaagagtgaggaaacccttctctttatctgcaattttgacaatatggagcatgagaaattccgtgtgggcgtgcccttccacggcaagtataaggagatattcaacactgatgccaaagactttggcggagaaggccgggtcaacgggcgtgtcaagacatcccggaagctggaatgggatgaaaaggacgattccattgaagtctatataccgccgatgagcgtcagcatctacacatgcacgcaggcggaagaatccgagaagcctgaggcaaagaagcctggagttaaaaaggcagcagataaaaagcctgcggccagaaaagcggcatccggaaaaacagcggctagtaaaacagcggtaagcaaaacagcgtccccaaagaggataactgctgtggcgcaggagacagaaggcgctgcagttgcaaaggatgtacagaagcctatggctgcgttcaaggcagggcagaagcagataatcacaaccaaggaagagcagaagcagataggcacgtccagggaagaacagaagcagataggcacgaccaaggaagagaagaagcagataggcacgaccaaggaggagcagaagcagataggcacttccaaggaagaacagaagcagataggcacttccaggaagaagcaggagcagataggcacgaccaaggaggagcagaagcagataggcacatccaaggaagaacagaagcagatagg

SEQ ID NO: 3139 - DNA, 22089 bp, Unknown
  gut microbiota DNA sequence
gaccttttgtttttagaattttcagggttttacatactgtctaatcttcaattatcaaggttctttgttgtcagcttgttcagcagcaacttttatatcttatcacagtcgcttgcgtttgtcaacaacttttttaactttttttgatttttgttttcagccaaatggctttccgcaatcatcagtcgctgttgttttttgtccagcgggtattaactataccataactgtcgtttattgtcaacaacttttcaaaactttttttcatcttacaaacaagagtgaaaaaaataatcatttggaaaatggagcggagaaagagggatttgaaccctcgcgccggtttcccgacctacacccttagcaggggcgcctcttcggcctcttgagtatttctccgaattgatattttccatatgattgcttcttttgacatgcttgtcctcagacgcattgaccattatactaaatagattttagcttgtcaagccatttttggtgagatttttatttatttcttcctgtatcctgtcatgcacaagatgtgctatttctgaggttttcattcccatatattgatccggaagaataggttccatatagtgaacctgcacttcttccctttttaacgagttcatgtcaaagggacggaaggaattaaccagggccacaggtacaatggggcagcctgcttttacagcactcttaaatgtaccgctcttaaaatccagtatttcatttccgttgcggctccggtggccttctgcaaatataacaaagttacggcctgactttacccgtttggtaacttcagttataatgcgcacctggtcttttatatcatccctgtccatagcaagacttttggttgcccccaatacctgctttaccagaatccagttggaggcctctttctttattacaacagacagcggtcttgggcaggttgaaaacagggcaagcatatcgaacaggccctgatgattgggaaacagtataaatccgtcctgagacggaatatgctctgttcccgttgcagtgaccgtaaccctgccccttctgttaatcctctttaccatctccgatatatacccatatttttcagcagccgtccttgtatcttcttctcttgccatacgcgaaatggtgaaaaaccatatcggtgcatggagtaaattcatgagtaccatatatataatccgcttcatatcccctcgctacagagtacaaaattcctttactgctgtttcatatagattattaccaagggcatccatcaccacaaccaccggaaaatcctgtatggccagtctgcgcactgcctctgtgcctaaatcttcatatgcaacaatttcggatgaaagaatgcatttggacagaatggctcctgctcctcccacggcggcaaaataaacagctccgttgcgcacaatggcatccataacaaccttgcttctctttccctttcctatcatggcccccatacccaggtccaaaaggcgcggcgtatacttatccatacggctggctgtggtaggaccggctgagccaatggctctcccctccctggctggggacggccccatgtaatatatgatgctgccctctatatcaaacggcagtgattcccctctgtcaagagcctcgtccatccgcttatgggcggcatccctggccgtataaatggttcccgtaagatatacataatctcctgcttttaaggaggcagcttcctcttttgtcattggtacattcatatgtcgattcatctgaacaggactcctttctcatttacagttttacagtactctgcgggcatgacggtttacatggcagcatatgtttacggcaaggggaaggccggctatatgggtggcgaatgtctctatgttcacggcaagggctgttaccctccctcccagtcccccggggccgatgcctgactgattgatccggtttaacatatcctcttccagatctctgacccactgcttcccaggcttatcctctatatccctggtcagggcgtgttttgccatctgggtacatttctcaaaggtcccgccaattcccactcccaccaccatgggaggacatgcattggggcctgcctctctcaccgcctgaaggatggattcttttaccccttccagaccgtctgcaggctttaacatgaacacacggctcatattctcgcttccaaatcccttgggagccactgttatgtcaatctgttccccatcaacaatttcacagtgaatgacagccggagtgttgtcctttgtattaattctctctataggatcccccaccacagatttacggagatatccctgttcatatccctgacgtacgccttcattgacagcatcggccagtcttccccctgtgatatgtacatcctgtcctattttcataaataccacagccatacccgtatcctggcagataggtattttatcctctcctgcgattttcaggttctccttaagctggcccagaacctggcggcccagaggggactcctcctcctccactgctttttcaaagacctttctcatatccggggccagtccgtaattggcctcaatacacatgtcccttattgcttctgtaatggttgctgcggctatctccctcatcttcgttgttcctcccatccttttgctacggcagccctgaattcatcttcaggcatgggctttccgtaataatatccctggacacaatccacgccgaattgtctcagtaattctatctgttcctcttcttccacgccttctgccacaattttctgacccatggcatggaatgtctccaccatactcctcacaaatacctggaccttgctgtccccgggcagacgtaccaaaaggcttctgtccagcttaatgtactcaaagggaagagacagggcacaggatatattggagtatccggtaccgaaatcatccagataaaacccaaatccttctcctgtcatttcctccatcatccttttcatataatccatgtcctgaagcagtacacgttccgtaacctcaatcttcaactgatccggattcagcccgcaccggttcaggcattcatggattctcgcacaaaggctgcggtcctcgaactgctgcatggaaaggttgatggagatagaatctattttgtcccgcatctgtccaagaagcgtgcagacctcctccagcacaatccagctcaggtcgtctataaggccggtttcttcagccaacggtatgaactccgacggcgatacgggttcaccgtcataatccctgagacgaaggagggcttctgcggaagaaaaccggttggtttttaagttaaatacaggctgataccataccttaaaccgcctttggcggatggatgtctccatgatatccagaatccgctttctcctgtttaactgttccagcagttttatatcaaaccgcctcaggcctcccggttcctttttggcatagtgaatgcccgattccagatattctataatctgggtggcattccattcctgtcccctgtatatcacatcggtgaaataggcctggatatagcttcccacggctcccagttcccatcgttcctcaaagcgttcctgtatccttttaaggcttccggttgattcttcttctgttgcatagggcagcagcactgcaaactccacatttccaaaccggaatgccttggcgccgggcagtatgtggtccagctccctggcaatattatataaaaactcatccccttttttgtagctgaatttctcattcacaagagaaaactgcttcagacacacaagaactacctggaaatactgcctgctggctattctcagggacagctcctcaaaaaagctgttcctgtttccgataaaggtaaggctgtccacctcacttcgcctggtctggaagctgatgaatataaccatattgacaatggccataaacatgccatttaactgaaggtccttataaatatgctggaacacaatacagatggctgcgatcaccggcatggtgcggattaacctgaccaccggcctgctgacgctgcgccggttgcgcatgtagcacagcaccagcataagcatctcaattgccatgactaaatatccaatcctgtttaagggacctcttatgtatatctggttttcatcaaaataaaacagcacgccgcttctaagattccagattacaattccccaaaatatgatattcagtataaggacgattctgccggttattctcaggcaacgtttatcatacacatgttccagtgtcagggcaaacatgtagacagccataacagagcaggtcaaaatacacagaatgaaatacaggctgttaagcagcatatttactccatgggaaacaacggcgggcttcgtgaccatatgtacacagacaatgttcaaaaggatggtcaagacggaaatccaaagacacacctgatagattttccgcctgctgttggataccagccgccgttcgtgatagtataaaatgagaataatatgaatgataagtcctaataattctgctgccaatgaccacattaccatattgttcggttctcctcttttgtccgtaaccaggtaagggaacaaaaacatcaatgactatttcataatgactatttcataaaaaggctgtcgcaactgacagccttttcatggaactgaatcttaaaccgtttcatctgaatctacatctgcttcactctcttcttcagaatccccgttctcttcctcgtaatactcttcatcaaatacattgctgtccttggtaacgctttcccttaccttggctatacttgccaccttgatgtcagaatcctgatcaatgctcatgagcttgacgccggaggtgtttcgtccaatcacggagatatcgtcaaccgtcatgcgtataataatgccttctgttgttattatcataatttcccggccgtcatttaccagcttggcacctaccagataaccggtcttatccgtacacttgtagcagataacaccctttccgcccctgttctgggcgctgaactcagtaatcatagtacgcttgcccatgccgttctcggaaaccaccagaaggctgtctccctggctctgcatctgcattccgatgacttcgtcgtcatcctcaaaccgcattccaatgacacccatggatacccggccggtcacccttacatcggtctcattgaaacggatacacattcccttgcgtgtgacaagcaggatatcctggctgttatctgttgcctttacctcaatcagctcatcgccgtcccgaagcacaattgcctgcagtccgttcttgcgcacatgctcatactccaccataggtgttttcttgaccatgccgtttctggtagccatgaacagatatttgtcatcgttaaattcacgcatggggataatggccgtaatcttctcctccggcatcagctgaagaaggtttataatagccgttcccctggctgtacgtcctgcctccggtatctcatatgccttcagacggtacacgcgtccggtattggtaaagaacatcatatagtgatggttggtggtcatgagaaggtcctcgatatagtcctcctcaatggtctgcatgcccttgattcccttgccgcctctgttctggctcctgaaattatctacatccatacgcttgatgtagcccagatgggtcatggcaatgatggtgtcctcgtccggaatcaggtcctccatggacatatcatcgtcatatccaatggctgtgcggcggtcatccccatatttatcagagataatcataatttcatcccggataacggtaaggagcttcttctcatccgcaagaattgccttcaattcctcgatctttgcctgaagttccctgtactcattctccagcttctcacgttccaaaccagtgagagcgcggagcctcatatccacgatagcctgtgactgtgcatcggaaagcccgaagcgctccatcaactggttcttggcatccgccacattggcggctccgcggatgatgcggattacctcgtcaatgttatccagggcaatcagcaatccctttaatatatgggctctttcttctgccttgtttaaatcatactgggtccttctggtaactacctcttcctgatgctttaagtactcctccagcatctggtgcaggttcagcacctttggctggttattgatcagggccagcataataacaccgaaggtgtcctgcagctgggtgtgctttagcagctggttcaggattacattggcatttacatccctgcgcagctctatgttgatccgcatgccttcacggttggactcatctccaatgtaggtaatgccgtcaattttcttttccttgacaaggtcggcgattttctcaatgagacgtgctttattaaccatgtagggaagttccgtcacaatgattctggattttccgttggccatggtctctatgttggtcacggcgcggaccttgattttggcgcgtcccgtgcggtaagcttcctcgattccccttctgcccagaatggtggcgccggtggggaaatcaggtccctttacaatctccatgatttcttccagggaggtctcacggtcctcctccaccctgttgtcaatcatcttcaccactgctccgatgatttccctcaggttgtggggaggaatattggtggccataccaacggcaataccggatgtgccgtttaccagcaggttaggatatctggatggaaggacaaggggctccctctcagtttcatcgaagttaggtacgaagtccacggtatctttattgatatctgccagcatttccatggaaatcttgcttaagcgggcctcagtgtaacgcatggccgcagcgccgtcgccgtccacagaaccaaagtttccgtggccgtccaccagaggataacgggtggaccactcctgcgccatgttaaccagcgctccgtaaatggaactgtctccatgggggtggtacttacccattgtatcaccgacgatacgggcgcacttacgatggggcttatccggaccgttgttcagctctatcatggaatacagcacacgccgctgtacaggcttaaggccgtccctgacatcaggcagggccctggcgctgataacactcatggcatagtcgatataggactgttccatggttttcttaaggtctacttcatgaaccttgtcaaatacatttggttccatattcaatctcctttatgtttgcagtctaaaatcagatatctaagttcttcacctttttcgcattggcttcaatgaattcccttctgggctctacctggtcgcccataagggtggtgaaggtcaaatctacttcagacgtggtttcctcatccatggtgacacgcagaagtatcctgcgttccggatccatggttgtctcccacagctgctccgcatccatctctcccagacctttgtaacgctggattttattgctgttgtcgcgtccaatctccttgaggatggaattcagctcatcatcgctgtacgcgtaccatacttttttattcttctccaccttatacagaggcggctgggccaggtatacatatccctgtttgattaactccggcataaatctgtaaataaatgtaagaaggagggtgctgatatgcgctccgtccacatcggcatccgtcatgatgatgattttgtggtaacggagtttggatatatcgaaatcgtcatgaatacctgttccaaatgcagttatcatggccttaatttccgcattgccgtaaatacggtccattctggccttttccacattgaggatcttgccgcgcaggggcaggatggcctgggtggcgcgtgaacgcgctgtctttgcagaaccgcctgcggaatctccctctacaatgtaaatctcgcagttttccggatttttgtcggaacagtcagccagtttgcccggaagggccatgccgtcaagggctgatttacggcgtgttaagtccctggcctttctggccgctgcacgggccctctgtgccagtatggatttctcacacatggacttggccacagccggattctgctccaggaaataggtcagctgctcgctgacaatattgtccactgccgcacgggcctcgctgtttcccagcttctgttttgtctggccctcaaactggggatcctcgattttaacactgatgatggctgtcaggccctcacgtatatcctcgccggacaggttatcctcgctgtcctttaatagctttttctccctggcatagtcgttgaaggtcttggtcagggcgttcttaaagccggtgagatgggtgcctccctcaggcgtattgatattgtttacaaatgtgtagatattctcggtataggaatcattgtgctgcatggaaacttccacatacacgccttccctggttccctcgcagtaaataacctgatcgtagataggggtcttgcccttgttcaggtatgtgacgaattccttgattccgccctcatagtggaataccttttctttcttttcgtccctgtcatccttgaggataatcttcaggtttttcgtcaggaacgccgtctccctgagccggattttgagggtatcataatcatagactgtctcttcaaatatttccttgtcaggcagaaaggtaactcttgtgccgtgctgttccggaccgcatttgcccacaatctttaaggggtatgttactttccccctttcataccgctgttggtaaatatttccatccttatagacctggacctccagccattcagacaatgcatttacaaccgaagcaccaacgccatgaaggccgccggataccttatatccgccgttgccgaatttaccgccggcatggaggatggtaaatacaacttccacggcaggaagacctgcctttttctggatgtctaccggaataccgcggccgtcatccatgactgtgatggaattgtcctcgttaatggtcacatcgatggaatcacaatatcccgccaatgcttcatctaccgcattatctacaatctcatacaccagatgatggagacctctggcagatgtgctgcctatatacatgccaggccgcttcctaaccgcctcaagtccttccaaaatctgaatctgatctgctccgtattgctctcccatgttatataatcatcctttctttctagtacggcattaattctcgttgatgacagtcccgtcaattaccttgaataccttatctatctggaacctgttattgacaaaatcatccagacctgtgcaggtaatcatagtctgtatatgtttgatggctgacagcagatggttctgcctgctgctgtccagctctgataacacatcatccaaaagcaggattggatcgtcatggctcaattgtttcaccagctgaagctctgacagcttaagggacagggccgctgtgcgctgctgcccctgggatccgaacctgcgtatatcaataccatttacaataaaacttatgtcatccctgtgtggtcccgacaatgtggtcttctgcttcatgtcctgggcccggttcttcttaaggatatcctccatctggtcttcccgggtgtagggttcataggaaatggatatgtcctccctgccgcctgtgagactcagatgaatggcgtgtatgatttcattgagctgcttaatgaattctcttcggaacttaatcacctcacgtccgtaattcaccagctgcatatcccacacatccagggtctcctcatattccggcctgaaaaacagttcctttaacagcttgtttcgctgaagaaggaccttattgtactgtacaagggaatggacatagagtttattcagctggcacagttccatatcaatgaaccgcctcctctcggatggcccgttctttatgatattcagatcctccggcgagaagaataccacattggctatgccgaacagctcactggccttgcgtatgggaaccccattgatggcaatgccctttggcttgttctttttcagatgcatgtcaatgcggtaagggacattgtttttccttatctgcaatttaatatgggattcatcctggttgaaccggatgatatccctgtccttggcgcttttatgtgatttggacgtgcagcacacatagactgcctccaggatattggtctttccctgggcattgtccccataaagtatattggttccctgattaaactccatatgtagttctttgtagttgcggtaatttttcagttctatggattctataatcatggattttcctgccagtctgctacttagtgattttaatggtttcacccttataggtgaccacatcaccgtccaccagtttttttccgcgctgataaacagtctcgccgtttacggatacgaggccgtcctgggcggcatatttggcttctacgcctgattctgccaggccagccgcttttaacgcctgacccagctttatatagtcttccctaagttttattatttccatacttttcctctcttagacagtggcagcattaaaattaacaggaagaatcagataaatataattttcctcctcgtccttgataaagcatggggactttggattcatcatataaatattgatttcttcatcgtcaatgacgcgcagcgcgtcgatgaggaacttggggttgaatccaatcatgatgtccttaccggtcttgtgaatcattaaatctgcattcatggagccgaaactggagttcagcttcagttccatggaattatctccgatattgataatcagaggcttcttgtcattttcacggatcagtatggtggcccgctcaatacagtccaggaattccttcttgttcacagatacctttgtctcataatcgctggaaagcatctggctgatcctgaaatattccccctcaatcagacgggatactacgatggtattgtcaaattcaaagaggatatggtttgtgctgaaataaatcagcacctctttttcattatcaccgcctaatattttgctgacctcgcttaaggtctttccaggtacgattacctttgtgtcctcataatggtcttttaaacgtactttgcggatggaaattctgtgtccgtccagagataccactttcagctggttttcattgacttcaaacagctccccggccatcatcttattgctgtcatttggtgagatggagaagatggtctgctggataacctcctttaaggtgaactgggagagacagatatacttatctttttctatatagggaaggtatgcaaattcttccccgtcccgtccctgtatattgaacacggagttttcacagctgatggttgtgttgaacttgtcatctgattcaatggtaacggatgcattttcactggaaagccttctggtgatttcagagaaaagcttggcatccagcgcgatcttgccgtgttccagtatgtctccctcaacccttgtctcgattcctaattccatatcattgcctgtaagcttgatttcgttggtgctggcgtcaatgagtatgcattcaagaatggacatggtggttttggaaggtacagctttcattacaatattaattccattaacaatggcgtctttttgaaatcttaacttcataatgttgataacttcctttcagagtaattgtgtgcccggtgtgtcatctgtgagtgaagatatagataattttcgtagaaaccgtagtaggggctgtgggtttgtgcaaaactgtctgaagtccttgataattaaggacaagcacctgtggagcaggatgtggaaaccatccactttcatgagggaaaacttaaagtttatccacaggtggttaaaagtcattcacaagcccttcagaaaagatcagttatcaacagcccgtccacatggattccacttcctattgtggattgatcttctttttcagtatctctatggtatttctcaacgtgtcatcctttgccatgtcgccggttatcttctcagcgccatgtatgatggtggtatggtcccttcctcccaggtagcgtccgatggtctggagaggagtggccgtcatatccctgcacaggtacatgacgatttgtcttgggtatacgatttccttattacgtttctgggatgaaatatccaggggggtaaggccgaaatgatcggaaaccacctggataatcaggtcaggggtcacttccctctgggcattgggggaaatgatgtcctttaatgcttcctcggccagttccagggtgatgtcgcacttgttaagccttgataacgcaacgatttttgtcagggctccctccagctcacggatattggatttgatattggtagcgatgtatttgattacctcgttatctatattatatccttccatctcctcctttttgcgcagaatcgccattcttgtctcataatcaggagactggatgtccacggtcaggccccattcaaagcgggatcggagacgttcctccagggtctcaatttctttcggcggtttatctgaggatatgataatctgtttctttgattcatataatgtgttaaaggtatggaaaaattcctcctgtgtgctttccttacctatgatgaactggatatcgtcgatgagaaggacatcgttgttcctgtatttttccctgaattccgtggtggttatgttgttcttattacggatagcgtcaatcagctcgttggtaaaggtttccgaggtgacgtacagtatcttggattttgcgttgttctttaatatgaagtgggcgatggcgtgcatcagatgggttttgccaagtcccacgcctccatatataaagagaggattgtatatctcacctggggattcagccacagcaagggcggctgcatgggccaggttgttatttccgcctacaacaaaggtatcaaaggtatacttgggatttaagttagcactctgtatgacatcggggctgacagatgccttgttgtttttaatcagctggggcgcagccggttcctccgcctccacgatttgctccttaactttgaaatccacctcgcattccttttcaaggaattccgagatggttacctttaataaaaatccatattttttatttacatattgtaaaaaggtctgttcgggaacaatgatggttactgtgttgtctttaaaagagtgcggctttaagggttccagccaggtactgtaggagatattggatatttcatgttcttcttttaaagtaagtaagattttgtcccagttttctttgattttttcgatcattttttgtctcctaaaactgtattgcagaattgcccaatctaaatctattgtatactaaagtaaaaattttttcaatgacaagtgtaaaatattgtggataactttgtgaattgggggtggatgccctgtgtaagcagtgtggaaagatcttttgtccacaaaaatcgtgaaaaagttaactggagttttacacatggtggaaatattcataaattctggattttttagatcgggctggggaaaaagcaggcattatcccatacttatccacaacttatccacattttgtggataatgttatgttaatctgggatcccatgtgaaaatagtcttgcatagaaagggaaacataagcctgaaatattgacgctgatgtgatttttacttataattacgttgtagcattgcattgtatctttatcataagaacagtagcaggaggaaaaaatgaatactttatccaaaacccgtgacctggtattggcagcagtcattgcagccattatcgtaatcatggcatttgtgccattcttagggtatattccgcttggattcatgaatgcgaccaccgttcatatccctgtgattatcggagccattattctgggaccgaaatacggggcattcctggggttgacattcggtctgaccagtttgtggaagaacaccttcatgccaaatcccacgtcctttgtgttttcaccctttgttaccatgggacagtttcacggaaatctgggaagcctggttatctgcctggttccaagaatactgattggggttgtggcctattatgtataccgtctgtttatgagaacgcttaagaacaggaggaataagcaggggaccgcattgtttgcggcaggcgtggccggatccctgaccaacacccttctggttatgaacctgatttattttttgtttggggatcagtatgcgtccgctgccagctggacagccaaatgggtatatggagtaatattgggaattatcggtatgcagggagtgccggaagccctggtggccggaattattgtgacggctgtagccggaatcctgctgaagctgacgcctgacatcagaggatagcagcgtataggaaggaaaacggatttatactaaatatagtaatgtagttttgcaatgcacacattttgttgggacagtctttgggactgtccttttttgccggttttttgttgattttttgagaaaatccgcttgacgaaggcggatttcttctatataattgagaagatgtttaattatactagtctaaatgtgtgttttcacattgccacataattttgataggaggtgcccggatatgaagatgacatttcagcccaagaagagacagagagcgaaagttcatggctttagagcaagaatgaagactgcaggcggtagaaaagttattgctgccagaagagctaaaggtagagcaaaattatctgcttaattgtttcaagcttaaagcaaaagaactacgggccacagcatcatgtggccttttcttttcttaccttcccggaaaaaggggagtgttttgacaacctgattgtaaggagtttcggatgaaacgatttccttccgttaagaagaacagtgagttccaggtgatatacaggaatggaacttcctatgcgaacagactgctggtgatgtatgtgatgaaaaccggggaagatgaaaaccgcattggcatatctgtgagcaaaaaagtgggcaacagtgttgtccgccatcatataacaaggcttttaagagagattttccgtttaaacaataatagaataaagactgggttaaacatcatcctggtagccagaggcgctgccagacaatcggattacaaacatttggagggtgcttacctgcacctgtgcggactgcatcacattttaaaagaatcgaagtgaagtgattatggcaagatgtctgattttgttggtaaggggataccagaagtttctgtcgccccttaaagtaagaactcactgtatttacacacctacatgctctcaatacgccattgaagcattaaaaaagtatggtgcgttaaagggtacatggttggcctgcaagaggatactccggtgtcacccatttgcagaaggcggttatgatccagttccgtagatcgaaggaggtagtgtattgaacagtatagctggcgcagtattattgacaaaaacaggaggtattctggggccgatagctgatatcctggggtggatcatggacttattgttccgttttaccagtaccttcggaatattaaatatcggtttatgtatcattttatttaccctggtaaccaaggtgctgatgatacctcttaccattaagcagcagaaatcatcaaaactcatggcagtcatgcagcccgaaattacagccattcagaagaagtacaagggcaaggaaagcgaccagaagtacgccatgatgatgcagactgaaatcaaggcggtttatgagaagtacggcacatccatgacaggcggatgtcttcctcttctgatccagatgcctattattttcgcgttgtaccgcgtcatatacaatattcctgcatatgtacagtccgtaagggtatattatgaagcagtggtaagcaagcttcccagcggatatgaagcatcccaggcatttacagacctggcacaggcccacaagatggtgggtgagagatttgactataccaatgtaaacacagtcattgatttattatataagctgacaggacagcagtgggattcactggtcaatgccttttcttccgtgggacaggcagttacggaaaccggcgtgagagtggtggatgccattgagaatatgcagaacttctttggtctgaatattgcatacacacccctgcaggttatcatgaactattttaataaggttgacaacaccactctgatgactgcctttgcagcactgtgcattccgctgttagcaggtttaagccagtggtacagcaccaagctgatgacagccaaccagccccagcagtctgaagatgctccgggcgcaaacatgatgaagagcatgaatgtgaccatgcctttaatgtccgtattcttctgtttctcatttgcatccggtatcggactttactgggttgcacagagtgtatttaccattatccagcaggtgggaatcaattcttatcttaataaggttgacattgacgacctggttcagaagaacattgaaaagacgaacaagaagcgcgcaaagaaaggccttcctcctacaaaagtgggcaatgtagacgagatgctcaagaagattgaggcaaaggaagaaaaggcagagcaggcccagatggctaagatcgctaagaccaagtctattgttgaggagtctaccaagtactataatgataatgccaagcccggaagtctggcggctaaggctaacatggtttccaagtataatgagaagcatgagaagggtaaaaagtaggagggttttgtatggatatgattacagttactgccaagacagtggacgaagcagttacaaaggcgttaatcgaacttgaaaccaccagcgacaaactggaatatgaagtagttgataaaggaagtacaggattccttggtatcggcgcaaaacctgccattattcgtgctaagaaaaaagagtccattgaggataaggccatggatttcctgtctcagatttttggggcaatgaatatgcaggtgaatattacagctgcatataaccaggaggagcaggagctgtccttaaacctggaaggcgaggacatggggatcctcattggcaagagggggcagaccctggattctctccagtatctggtgagcctgattgtgaacaagggaacagaaggatatctcagggtgaagctggatactgagaattaccgtgagagaaggaaggaaaccctggagaccctggctaagaacattgcctataaggttaagagaaccaagagaccggtatcccttgaacctatgaatccttatgagagaagaatcattcatgcggctcttcagaatgataagtatgttaccaccagaagcgaaggggaagagcccttccgccatgtggtgattgcccttaagaaggaggcagcgtccggcgaccgtaaaggacgctatgacagaaataaagggggacgttttgagcgttccgaccgttccggcggatataggaataaccgccgcaccaatggaaacagtgcatctcagacaggttcagatgcatcagcagagactgctgccggtgaagaagaataagcccatccgtggttgatcggatgcaggcagtaatgaaacaggttaagaggctgttgctgaagcgacggcctttttgctctattgtgaggagagcctatgaagacagatacgatagcggctatagctacaggtatgagcaattcaggaatcggaatcgtgagaatcagcggagagcaggcgttttccgtgattgattccatattccggaacagaaagggggagagggtcagactgagcctttcccagtcccacacagtccattatgggtatatatatgacggtgatgagaaggtggacgaggccctggtcattatcatgaaggggccacacagctatacggctgaggatacggtggagattgactgccacgggggagtgcttatggtcaggcggattctggagactgttcttcacgcaggggccagaacagcggaaccgggagagtttacaaagagggctttcttaaatggaaggttggatttgtcccaggccgaggcggtggcagatgtgattcacgccaccaatgaatatgcattaaaaagctctgtgagccagctgagcggttcagtgtccgctaaaattaaggaactgcgcagccggatactgtatcagatagcttttatcgaatcagctctggatgatccggaacatatatcactggatggatatgggagccggctgatggatgatctggtgcctatgattggtgaggtgaggaagctgctcctgtctgcggatgacggaagggttatgtccgaaggggtaaagacagttatactgggtaagcccaatgcaggtaaatcctctctgatgaatgtgcttttgggagaggagagggccattgttactgaaattgcgggaactaccagggataccctggaagagcatatttatttgcagggaatcagtcttaatgtggtggatacggcgggaatcagggatacagaggatgtggtggagaaaatcggtgtggaccgggcgatgaaagcagccagggacgctgatttaattatctatgtggtggatggttccaggcccttggatgaaagcgacagggaaataatagaatttatccgggacagaaaaaccattgtattgctgaacaaatcggatttggatttggaagtgggtacggccgagctggaacagatttgcggacataaggtgctccctgtttctgctaaagaagaacagggaatcgagctgctggagcaggaaatcaagaagctcttttatcacggcgacctgtcttttaacgaccaggtttatattacaaatgcgcgtcataaggaagccctggagcagtgtctggagagtctgctgatggtaaagggaagcgttgaggacagcatgccagaggatttttattccattgacctgatgaatgcatatgaacagctgggtttcattatcggggaggcagtggatgatgatgttgtcaatgagatatttgcaaaattctgtatgggtaaatagggaaatttaatatggaagaggaacgcggaatgataccttatttagaagaaacatacgatgtggtgattgtcggtgccggtcatgcaggatgtgaggccgctctggccagtgcaaggctgggtatggaaacgattatgtttactgtcagcgtggacagcatagcgctgatgccctgtaaccctaacataggaggaagctccaaggggcatctggtcagggagttagatgcgctgggcggagagatggggaagaatatagacaagaccttcatacagtccaagatgcttaatgaatccaagggaccggctgttcattccctgcgggctcaggctgacaagcaggattacagcaggcatatgagaaggaccctggaaaacacagatcatcttaccatacgtcaggcggaagtgtctgaaattatggcggaggatggtaaaatcaggggagtaaagacattttccggcgcagtgtattacgcaaaggctgtgatactgtgtacgggaacgtatctgaaagccaggtgtatctatggggatgtgagcaatcctacagggcctaacggccttcaggcagccaaccatcttacggattctttgagggaacatggaattgagatgttccggttcaagacagggacgccggccagggtggataaaaaaagcattgatttttctaaaatggaagagcagtttggggatcccagggttgtgccgttttcattttcaacaaatccggatgaaatccagaaagaccaggtttcctgctggctgacgtataccaatgaaaatacccatcgtatcatcaaggataatctggaccgttcacctctgttttcaggggccattgagggaaccggaccaaggtattgtccttccattgaggataaggtggttaaattcccggataagaaccgtcatcaggtatttgtggagccggagggcctttacaccaatgagatgtatctgggaggcatgagcagttcactgccggaggatgtacagtatgcaatgtaccgtacggttccgggacttgaaaaggtaaagatagtgagaaatgcctatgccattgaatatgactgtattaacgctcttcagcttaagccgactctggagtttaagaagatttccggtctgtttgcaggcgggcagtttaacggaagctcagggtatgaggaggcggccgtccaggggttcatggctggtgtgaatgcagtaatgaagatacgtggacaggaggctgtggttctggaccgttcacaggcatatataggggttctgattgatgatctggtaacaaaggaaaaccatgaaccttaccggatgatgacttccagggcagagtacaggcttttgctgcgccaggacaatgcagatataagactcagaaaaatcggtcatgaaatcggcctggtaagtgatgaagagtatgaacatcttttaaggaagatggatgatatacagtcagagatcaaacggctggaaaagactgttataggtgtgagtaatcgggggcaaatgtttttggagaaatatggaagcaccttattgaagtccggaataacgctggcagagctggtcaagaggccggaattggattatgttaaactggcggaactggatgaaggcaggcctgaacttcctgatgatgtcagagaacaggttaatattgagattaagtatgaaggatatataaagcgtcagatgcagcaggtggcacagtttaagaagctggaggataagaaactgcccgaggactttgactattcagaggtaaacagccttcgcagggaggcagttcagaagctgaacaaagtgcagccggcaaccattggacaggcatcccgtatatcaggtgtatcaccggcggacatatctgttctgctggtgcattttacaagaaagcagtgagagggtctgatatgacagatacatttagacagcagatggaccgggagcttggccttctggggataaaattaagtgagaagcaattggagcagttttttacttattatgaaatgctggtggaaaagaataaggttatgaacctgacagccataacagatgagacaggcgtagtatccaaacattttggtgacagcctgtcactatttagggtgttgaaacgggtgatggattccggtgatgggtgtgacggcagcagagtgtatgaggaagaactgttggagggaaagtcggttattgacgtaggaacaggcgcaggatttccaggtataccccttaaaatagcttttccgggaataaaactcaccttgctggattccttgaataagagagttaaatttctggaggaagtctgtgatgcattggaattaaaaaacgtggaatttattcatgggagagctgaggatataggaaggcagaaagagcacagggaaatgtatgatttgtgcgtgtccagggctgtggcaaatttggcttctctgtctgagtattgtatgccctttgtgaagattggcggtttctttgttccttataaatccggcgagatagaagatgagctgaagtctgccggcagggcggttggaatattgggaggagaactagaatttgtagataaatttatgctgcccggtacagatgcttccagatctttggtggtaataaagaaggtgaaagggatttctaaaaagtatccaaggaaggcaggaatgccaactaaggagcctttgggatagaagtggatgtgggaatgtttcacgtgaaacattcccttttttcttgactgaatttattattgttataagcatgtatagatttaattgtttttaattttaagtgtaataaaaactcatagatatttttttgttattatatagggaatgaaaaattgaaaagatggaagagcgtatatgaagtaatagaatttactaagttatatgatgcattaatttatataatttattaggtgacaaaatgtgagaaggaacttattgcgttaaataatataagatgttttagtcagaataatgagttattcagtatcatggattag

SEQ ID NO: 3140 - DNA, 106852 bp, Unknown
  gut microbiota DNA sequence
tccatgccatgtataaggaacagtcagaaaaaagaattgtaatttaatgtgtgttacattaaaaacaggttgaagctgtcaataaatacaaaaaaataatcaaacaaacaaaaaaaccatgcatgtattgaggggataaaatgtttttgtgtgaaagaatataaaatatgcataaaaaaataaaaataaattacacattgacaagcataatgttcaatgctatattattaaataagggaagagataaaccgctccaccaaagcagtttttattttttttatacatttgataaaccgttctactaaaccgttccacctacacgtattttgcgaaaagaccatgttttttgagcaggaagtgtggtaatattggtttattatcataattcatgaggtgagagtatgaagaacgcgacaatatctgatgtagcaaagctttcaggggtttccaagtccactgtatcaaattatctgaatggaaatttcgagagaatgtctgacgagacgaaaaagaagataaaaaatgcaattgatgaattggggtatacaccaagtttgagcgcccgcaggctgtcgtctaaaaatcacagcaagacagtttgtttagccattcccagaaatatttcacatttaaacgataccatgtattacccggtcatattctcggctcttggcgaggaagcaaagaaatttgattataatactctgatttattccatggattcagatgatatcaataaagacacagagtatttaaagagcctgtcgtcgtctctggtagacggcatcctattgtatgacctggaagaagacagtctggccttcagggagtttgagagggcaggaatcccttatgtgtgcgtgggtaagatactcagcctggagaattataattatgtggcgtctgaccacggcaaagcgatgaaggatgtactggagtatttttataacctggagcacaaaaaagtggccattgtcacggagggaaagtccaacagcgtggtgcagactgtgagaagtacggcttttaatgagtttatgtctgaaaggaaagaagagaaattggactattcttatatcagaatcaatcagaatgaatcatcatccgatatcaagctgctgttcaatgaactgcttaatcctgcaaaccgtccaacagcagttggtattatcagctgctttatgaaccaattcatggatgtggtaaagggatatggaatcaggataccggaagacctgtctgtgatgattcttgagtattataagaattccaatgtagatgaggagtatcaggattttacctgtgtggaatccaaggctgagaaggtgacgagaatcgctatgaagaagcttgtaaagctgattgacagcggaaagccttttgagtcggaactggttggtttgaaggtgtgtgtgaaaaactcaacttcaaaacctaaaaagcgaggaggcaggaagttatgaagaaaagatatacaaaaatagtatctcttgtactgggatttggattagcagcatctatggttgcgggatgttctgtgaaatcatcggaaaacgtggttacaacagcagctcccaccgccgccaaggctgagacaacagcatcagcggaatcaggaggaagcgccgcggaacagaagaagatggtattctgggataagtcagagtatgttgagggctataacactatgatgaaggcaaaggtagacgaatttgccagcgagaatcatgtggatgtggattatgtggtcatacctgctgctgatatgaagcagaagctgatggctgccattgaagcaggcaatgcccctgacctgattgtgggtgatgatacgctggtggggcagtttgtttccatgcagcagatagcagagtgctcagatatatttgaggccgtggattttacggagaactcaaaaatactgggaaccttcaacggcaagccctatcttgtgcctctggcttttacggcgcccggcatgtacttaaggacggaccagtgggagaaaaccggtatggatattcccacaacctgggaagaactgaaggaaggcgccaagctgatgaatgacccggctaacggcttttacggccttggatttgccatgggcgcatccggcggaggagatgccgagggattttgcagaaccattatactggactggggaggaattccggtagacgagaacggaaaggtaacggttaattctcccgaaacactggaagcacttaaatttattgcaagcttatatgaagagggactgattccgcctgatgcgattacgggagacgacagctggaataacaacgcatacctggccggtactgtgggtgtcatcacaaattcaggttccgtggtatccagcatgaaagaggaaaaaccagatcttcttgcgaatacacagatcatcgcatatcccgcagggccaaccggagaggcattcaccctgggcggcgccaatgtattcggaatatttgagacaggtaaaaatacagagaccgcaaaagagtttgttaaatactattttgaggacctggataattataacgccatgatcgaagccatgggtgccatgtggcagccggtggtgaacggagtggatgacacggatttctggaaggacccggtcaatgcaggatggcttgccaactctaagaatacatataagacctattatccggcgccgtcagatgaaagggctacggtatcctttacaaaccagctttgcgttaaggccgtacaggaaatagttgttaacaaggctgatccgcaggaagccctggaccatctggaggcagaattcaataagatttataactaacaatggaattggcatgacagggggataagatggcaggaaaaaaatcagagaaaaggaagtattcgcattcccagcagctgttagataagcgtctcgggcttctgttgatggtgccaattgctgccgtgatatttggtattaccggaatcccgtttataagggcattgtacttaagctttacgaacaaagtggtaggggtaccggaacagtttattgggtttgacaactatctggctctatttggggataagatttactggaagtccctgtacaatacgattatctatacagtgggatgtatcacggcgaaactggcgctgggacttctgctggcagttatcctgaaccagaagttcaggggaaaggcatttttcaggaccgcgcttcttattccctgggcattgcccggaatggtggcggccactacctggagatggatgtatgacagcacgtacggcattatcaacagcctgctgctgaaagccgggcttataagccttcctatcccatggctgagcaaccctgatatcacgctgttaagcaccatgattgtgaatgtgtggagaggtgtgcctttcttcatgttcagtcttctgggagcgctgcagactctggacggacagatttttgaggcggcctatgtggacggcgcaggtatgtttaagcgtttctggtatataacgcttccgggaatctcaagcgttttgggcatttccacacttttgtcaaccatatggacctttaatgattttgagaatgtatttttaatcactggaggtggaccgatttactcctccagtgtaatctccacttacacctatgacctggcatttatacagaattcatttggcagggctctctcggtggcagtgtcggtgataccgctaatgctcatactgattctggtatcccagaaggtaattaatggggacagaaatgaatagggaaggagatggactggatggtaatgaagaaacgcagccggatcatgcggaccacagctacctacgggattttaatgattgcgcttttatggacaatctttcccatttactggatgataaaatcatcccttactgtaaatgaagaaatgtatgtggccagaccgccgttattttcaaatgtaataacctttgatcattatattgatttgatttataacacctcttttatgcacaatgtctggaacagctttgtgatagcagccattacaacaatcatatgcctggcaatcggtatacttggatcgtatgcaatgacacggcttaagtatccgggaagatcttttttcaggaacagtattataatttcataccttatgcctacggcggtgctgttcgtacccatgtatgtgtttgtgagcagcttggggttctatgataataaatatgcgcttttaatcatataccctacatttgtagtgccctattgctgctatatgcttatcagctattttaaggcgattccatatgcgctggaggaggcggcgcttatagacggctgcaaccgtctgcagacgctgtggtatatcattatgccgattgcccttcccggaattgcagtggtggccacctttgcatttaccatggcgtggaatgaatatctgtatgccatgattatgacaaccagcaatgtgcagaaaacggctacggtagccatatcgggcttcaagtatgctgattccgccatatgggggagaatcatgagcgcttcagtggtctgctcactgccggtaacgctgctttatattgttgcgcagagcatgctcatatccggcaaatatgaaggaagtgttaagtaaaacgcgagaataaaagagaggaaacaggaatggaagatagagacgatatgcttatggatcatgtgaataccaattccagaccaggtgacttaaagattacggacataagggtagctgatattgtaggggctcccatgcattgtaccctggtaaaggtttatacaaaccagggactggtgggctatggagaagtgagggacggcgggtcccgcaattatgtgctggcacttaaaagccgtcttataggcgagaatccctgcaatattgataagctgttccgcaggattaaacagttcggaggccctgccagacagggcggcggagtatgcggcatagagcttgccctctgggacctggcgggaaaagcatatggggtaccggtgtatcagatgctgggaggtaaattcagggaccgcatcagaatgtactgcgatacggatatcgagggaaaacataccggcaaggaaatgggggaagcccttaaaaagaggatggagaagggatttactttcctgaaaatggatttgggaatcgatcttctgtatgacattccgggggcgttgtgcgcgccgttaggcatggtcggggatttaaaccagtcgtccagaacatatgaggccatcagccgcagactgactccggaaaagaggagcttaaggaaccggatgtatgacatgcagaatattccccatccgtttacaggggtccaggtaacggaatatggttatgatattctggagcagtatgtaaaggatgttagaagtgtgattgggtatgagattcctctggctattgaccatttcgggcatataggcgtggaatcctgcatcaggctggccagaaggattgagaagtacaatatcgcatggatggaggacctgataccctggcagctgacagaccagtacgtaaggctgagaaattccaccacagtgcccatttgtacaggtgaggacatatatctgaaagagaatttccgtcctcttatggaacggggaggcgtatcagtcatccatccggatattctgaccagcggtggcatactggagaacaagaaaatcggggacatggcacaggaatacggagtggccatggcagtacatatggcggaaagccccattgcctgtatggcagcggtccacagtattgcagccactgaaaacttcctggctttggagttccattccgtggacgttccatggtggtccgacctggtaacaggattgccaaatccaatcgtagacaacggatatataacagtgcctgacgcgccggggcttgggattgaaaacctggaggatgaagtgatacgtgaacatctccatccggattacccggatatgtgggcagatacatccgattgggacaatgattattcacatgaccgcacctggtcataatgggagaggggaaaatatgatttattatacaagagatcagattatagagttgaccagccggtggaagggagagcgctttgaagacggaaggcccagggtaccggactatcttctggataaattgcggaccatgacaattgaggagatatggctgcctttatttcttaaggactacaagtttcagtttgagggtgagatgaagaagttgcacgacggactgaaactggtaggaagggctgtaacggctgtctttatgcccacaagacctgatttaatggaagctgtcaggacggaaggggatgccagagggtatcagggtacatgcaaccagtgggtggttgaccacctgcaggaaggggatgtggtggttgccgacatgtttgacaaggtttggaacggcacatttgtaggcgggaatctgaccacagccatcaatgtcaggaccaggacagggggcgctgtaatatggggaggcgtgcgcgatatcgagcagatgcaaaagattgacacccaggtttattacaggggaacagaccccacccccatcagggaatgcctgatgacatcctataacggacctgcaaagattggcaaggcagtgtgtatgcccggcgatattgtcatgggcaccaccagcggtatcctgtttatccccgcatatcttgtggaggagctggtcaacagcgctgaaaaatcacatgccaaggatatatttggttttgccatgctggaacagggaacatacagtgcggctgaaattgacagcacggtctggcctgaggaaatggtagacaaaatgattgattttattgaacatgattcctcctgtgagaagtacaggggactggactggtccttggaaataaatgcggccagaggagatcaggaagcggtggatgaattgatgaaggggtatcttgtgtaatggatatcctgcgtgacagataccttatgtaatggtgatacggcatcatgcagacctgccaataagcgggcagagggtcagccaattgcaaaaccccgccccatcagaaatggcggtctgatggaacagggattgcaaaggccgtattacatatcactatttgtatgaatagaggggcattcgggagggataccgtcggtattcctcccggatgcctcaaaatcatttatcttacgcaggaatccaaagccagtgtttccaccgcgtcatacccggcgttgaatgccttttcattggcttcattaaaacgggattttccctttttctcaaacatatggatcatggctgcgatggctgcctccttggtaaagtcgcccatgagctttacgatggcgcctgtcatgacaatattggcgcccttgggattgtttaattcagtggaaatcctggtggccggcacacgcacataggtcacgtccttccgggcatcctccggtatctccaccaggtcgccgattaccaccaccccgccgggcgctaccagggggaggaatttgtgaaaggatgggctgttcatggccagaagcaggtcaggctgttcctgggatgggttataaatggtattctcacagtatttcaccgtgcagttggcagtgccgccgcgcatggcggagccgtaggaggggacccaggtcacattgatgccctctgtggcggcaatatcagagatgattagcccggctgtcaatacaccctgtccgccggaacctgcaaatacgatttccttcatgattaacgcacctctcttttcttgaattcacctaatggatagtaggggaccagttcgctttcaatacgctccatggcctttaccggggtaagtccccagtttaccggacagggggagagcacttcgatgacagagtatccctcatgattcatctgcgcctggaggccgtttttgatataacccttcagctggtttattttggaaggactggtcactgtgcccctggccgcgtaggcagcgccggggaattccctggccaccatctcaggaaaacgcaggggataaccggtgacgctgcagtcacgtccatgcacgctggtggaggtcttctggccttccatggtggtaaggctcatctgaccgccggtcatgccgaagttggtgttgttcacaacgataacagttatgttttcattgcggtatgccgcgttgaaggtttccgcgattcctatgttgtaggcgtcgccgtcgccctggtaggatacgatgaggacatccggattgacccgcttcatgccggtggccactgcgcctgcccgtccatgggaacagtggaggcggtcgcattccaggcctgcacccagattggaggaacatcccactccaatggggaagatgatgttatcactctgctccagttcatccagacactccatgatgaggcggcttatgattccgtggccgcatcccgggcagaagtccattggcttatctaccagaacagggacttttctttctttattggaagctgacattttaatatacctcctttttgctgcctgattttacttcaaaatagtcttttttgatattgcggatggttggcgtgccaaacacataggtaagggcgtaggccggcacattgcgctcctttaacgcctttttcgtgtagagggcagcgtcatccaccagctggcccgtagcattggcctccacggtgatgattccctttacgttgggattgattttgtaaaatgctttttccgggaaaggccagaccgtgatggggcggatgattcccactttttctccctgggccctcagctcgcggacagcgccaagggtgctgcggcccggaactccgtatgacacgaatacatagtccgcatcctccagtccctcatcttcccaccgctgctcattttccctgatagtgttatatttgtctaccagctccacggcttccttcatggagtcccgttgaaagataccgatttttttgtatgtataatggccgtttaacgcccatggggtgcgctctgcctccacgaaatcgggaagggttaccggctccatcatctggcccagggtggcttcgcccatcatgacggataccacgcggtacttttcagccagctcataagccgggcgcatcaggtccacgaattcctggaccgaagcaggggcaaataccagacagcggtaatcgccgtggccgccgcctcttgtctcacggttgtaatcacactgggcggacagcagggtgcccagcccgttgccgtatctgacctgggttatgaccaccgcggacaggccctcgtcggacagggtggatacgccttcctgtttcagggatatgcctgggccggaggaagcggtcagggccctgactccggacgcggctgcgccgattaccatgttgatgcctgccagctcgctttccgcctgcacaaaactgccgcccacttccgggagacgccaggataaatattccataatctcgctggacggtgtaatgggataacctgcatagaatttaactccagccctgacggctgcctctgcaatggcttcattgcctttcatcatctctgccatgaattatttaacctccccttctatatttgctgatacgtggaatacgccgtccggacatgtgatgtagcacattccgcaggcaatacacgcctcgtcgtccacctggaccggatagtaaccgttggcattcaggacatcacatttgctgatagcctttctcggacagtggtggatgcataatccacattccttgcagcggtctttatttaccgtgaccttcataattaatcctcctgtcaatattttgtgttctgctgtatagaacgttgttccgttaaatggaattatacatctgctgcattttaattgtcaagtaggagactatttgctatttagacaaaaataaaagcccaaatatatgaatagtgcacaaacaccgtttatccttgacatcgttaaaaaaatggtttttaattattatcagatggtttggatacatacaggatagggaatgtaactggaatataggaggaaacaaaggatggctgatacgatccaggcattggaccgggcattggaactgttaatttatttaaataagcagggcagggaagtgggtataacccagattgcttctgatatgggggtttacaagagtacggtgttccgcaccttatccactctggaagccagaggatttgtgagcaggaacccggagacagagaagtactggctgggaagccagctgtttgtgctgggaaagagcgtggagaataaaatgggaatccaggaggttatacggccttatgcccgcaggctgcaccagaaataccatgaggtggtgaacgtgtccatattagagcataatcccggcgatgtataccacagtgtcattatactgaaggagatgagcgaccagcagcttttgaccgtgaacccgccggtaggctccctcagtgagtgccattgctctgcggttggaaaatgccttctggcctttagcgataatatagactgggcaccctatgaggaacgggagctgacccgatatacggtaaacaccattctttcctatgaggatttgaaggaggaaatcgacaaggtgcggcgcaggggttacgccatggaccatgaggagcaggagatgggccttacctgcataggagcccctatccttgaccgcaataaaaaggctgttgcggccatcagtctttccggccccaccagccgtatgaactcctcggatttagaggacaggattgaggctgtctgcaataccgccagggatatatctgggaatttttagggatatttacgtctgcctgccaggcgcggcagagggggaaagataaattgcacaaaaaatatttgacaacacatgaaagctatgctattatgctgtctataaccattgctgtatgtgatttgatacaggaaggggaaaggaacggattgagtttcctttcttttttacctcttttacagaacggtgttccgtacaatagaacaacatttaaaccaccagacggaaagaggggtaattttcaatgaaactattaatcatcaatcctggagggacatccacaaaaatcgctgtatttgaggatgaggaacaggtgctcaaaaagaacattattcacacccaggaggagttaagcgggttcagccatgtatttgaccagttcggttacaggaaggggctgatccttaaaacgcttgaggaagaaggcgtggatatacatgagctgtccggagtggctgggcggggagggcttatgaatcccataccgggcggcacctaccgggtgaatgagaggatgctggaggatttggaacatgcggtccacggagagcatccttctaacctgggtgcggccctggccagaagcatcggagaccagattggggtgccgtcttttgtggtggaccctgtttcggtggatgagctgatgccgaaggccaggatatcaggcatttccgacctggagcgtcccagctggtttcatgcgctgaaccataaagctgtggccagatgggcagcggagcgtatcggaaagaagtatgaggagagcagtctgatcatagcccatctgggttccggaaactccgtggtggcccacaaaaacggccagatgatagacggaagcggaggaaggaccaacggtcccttttctccggagcggagcggcggacttcctacctaccccctggtggagctgtgctattccggaaaatacacccgtgaagagatggtggccaaaatcagcagcaccggcggcatgtatgactacctgggcacaaaagatgccggtgaggtggaacgccggatgggacttggggacgagacggcaaagctggtctatgaagcgtttgtgtacatggtggcaaaggagatatgttcgtatgcggctgtctttgaaggaaaggtggactgcatcgtactgacaggaggcatagcccattcccggtatgtgacagatgaaatcaggcgtatggcgggattccttgcgccggtggaagtggtggcaggggaattcgagatgacagccctggcccttggggcgctgagggtgcttaagggggaagaagaacccagggaatatgagtgatttggccatatgagaggaagagggtggattcattgagcgaggaccacaaagaaaagagacagccgggggccgtcatgtccttcctggtgtttggggcagccattgcggttttactgctgggggttgtgctgcttgattatgacatacatattgtgctgctttgcgccctggccgtggtgtgcattgcttcggtgcctttgggctacagcttcatggacctggtggactgtatgaagaaatccctgggccaggccctggcagccatgatcatatttatatttatcggtatcataatcagttcgctgatattttcaggaaccgtgccggcccttatttactacggactgcaatatattatccctgattatttccttcccataggcctgcttttgtgcagtcttacgtccatatccatcggcacgtcctggggaaccgtgggcaccatgggactggctatgatgggaattggggcaggtatggggatacctgcgcctctcaccgcaggcatggttatatcaggggcatttttcggggataagatgtcatccatatcagacagcaccaacctggcccccgcagcagcgggaaccacgctgtatgcccatattggggctatgtggaagactacctttccttcctatatcattactctggcagtatttacagtattgggattatcctatcacggagggaatttcagcatggatactgtaaacctgtttctggataccatcggcggccggtttcacataagccccctggtgctgatgcctatggcggtgcttctgattctgaacctgatgaaatatcccgcagttcccagtatggccatcggcacggtcctggctgtattggtggcagtgttctatcagggctgtcccatgagggaggtggtggccggactcaattacggttatgcggaatccaccggtgtggagctggtggataagctgctgctgaggggcggaatacagagtatgatgtatacattttccctgtcctgtatcgccatatcattcgggggtgttatggagcatgtggggtatcttccccaaatcgtgaaggttattattaaacgggtcaggagcgacaggatgatggtgccggtggtcatagccagcacgaccttcggcacccttaccatgggggaggtattcctctccatcgtggtaaacggcagtttatataaggaagcattcagggaaaggggactgcgtccggaaatgctctcgcggctgctggaagaaggtggcacattgacccaggtatttattccctggtccaccagcggcgtatttatcctctccacccttggggtgggcgtgtcccagtactggaaatatgcagtattgaattatgtaaaccctgttttatccattgtcctggccatgttcggcatctatgtgctgaaggttggcgcggaagagaaaaagagcctgtgccatagattgattcacagccataaattaagctgatgattagggccggccaattaagataatatatattgaggagaaataaaccatgataaagaattttgcagaattacaggagcgggtcaggtcatcagagcctttggtggtaagcatggcccaggcggctgaccaggaagtgcttttatcggtaaaagcagcagcggaccagggatttataaaacccgtgctgacaggagaccgggaaaggatagaggaactctgcggccgcatagggcttaagcctctggaaatccttcaggccggcacggaggaggaggcagtggagcgggcggtcagggccgtgcacgacggcagcgcccaggtactgatgaaggggcttgtcaataccagcgtctatatgaggggaatcctcaacagggaatgggggcttcgtaccggacggctgctgtccatgatggctgtctacgaggcgccgggctatcacaagctgctgttctgttctgacagcggtatcaatgtggccccgaacctggagcagaagaaggatatacttaagaaccttctgtacgcggtccgaaatatgggaatacagaatcccaaggtggcggtgctcacggccaacgagatggtggaccccaaggtggtttccaccacggatgcggccggtctggtagaggcggttaaaaaggaagagggatttcttccatgcatcatagaaggtcccattgcatttgacgttgcatttgacccaaaggcagcggcccacaagaaaatcaacagcaggattacaggggatgtggatctggtcatattccccaacatagaggcgggcaatatcatgggcaagtcatggatacatctctgccgcagcccatggggcggtatcgtgctgggagcttccaaccccgttatcctggggtcgcgttccgacacagcagaaatcaaactgaattccattgcattggcctgcctggcagcccaatcaggtaaataaacaggaggggttattatgtctaattcaaaggtctcaatcaccggtaaacagcttttaatcgtattttttatgggtctggcatttgcggttgtgtatgccacaccctttgtacagtatgtattttatgatgatcttgcaggcgcccttcacgccaccaatacgcagctgggcttcctgattgccattttcggaatcggaaatctgctggcgccctttggaggcgcgttaagcgataaatttaacacaaaaaaggtctatcttctgggaatgttcatcacctgcgccttgaattttctcctggccatgaatatgagctacacctttgccatctttatctgggcgggcctggctgttgcgggattaatcctttattttccggcacatacaaagctggtgcgtctggtgggagatgaggaaagccagggcaccatattcggatttacggagtcagcctgcggcctggcaagcgttattatcaattttattgccctgggcctctatgccaaggtggcagtgggagccatgggaggcgtggcaggattaaaggcggttatcataagctacggggcagtcgggcttattgcaaccattgccctggtgttcctgctgcctgaccctgaaaaggcagggaaaggccaggacggaggggacagcggtcaggagaccaagctgtccatgaaggaatgggcgggagtgtttaaggatccccgcacatggtttgcgggcatagcggtatttgccacatattccacataccagacactgtcatactttaccccgtatttcacaaatgtgctgggggcaaccgtggtgggatccggggccatcgccatcatcaggacgtatggaatccgtattgtgggagcgcctctgggcggatatatgggggaccgtattcattccgtgtcatcggtcatagccactgttctggcctgcggcgccgtcatcaccctgattttcatgttcatgcccgcaggggtgccgtcagtccttctgactgttatgacattggtgattggttttatggtacatattgcaagaggcgccatgtttgcggtgccgtctgaggtgaaaatacccaggcgctatgcggcgtccactgccggcgttgtctgcgccatcggattctgcccggatctgtttcaggcagccatgtacggccattggctggacacctgcggcaacgccggatatacaaggatttttatttacatcatcgcgattatggtggtcggagtcatcaatggcgtggctactgttgtttataagaagaaatatgtggctgcgggcctggttccggtggaaggcggaactgaggctgctcaggcgcagtgagggaattgttagaaagaaaaaaaggatgagctgccgcgggattgtgggcggctcatttttatgtgggggatgggaagcgggggaagttgcgtaatatgtttgaatcaatgtattgacattgctgccattcttttatataatataaccaaccagttagtttttgagaaagaggaattcatgacgaaacaagagataaaatccacccagacaaagcaggccatattaaaggcagcagaagaggaattttccgaaaagggaatatatggagcgcgggtagacgagattgctgccaaggcaaagattaataaaggtatgatttaccagtattttggaaataaagaggaactgtataaaacagttcttaaaaatgtttacgacaggttgggagacagtgaagatttggtcatatgtaatcagaagaactgtatatctgagataacggatctggtgaggacttatttttatttccttcgcgataatccttcctatgtcaggatggtcatgtgggaaaacctgaattacggatattatttccaggaaaaggagctgggggatgtaaaaaaccccatccgattggaattgggaaagataatggaggaagggaaaaaagcaggggaaatttcggaacaggtatgtgaagaagatatattccagacattgattgcatgcagctttaactatttttccaaccgctggaccttaaaacagattttaaaaaaagatttggataagaatgatgagattgaaagacgaatcaagcaggtaaccaagatggttgtttcttatataaaaaaagactgagccggtttcggcttatgtttttatataaaaactaactaactagttatatataaaaggagggggcgaaaaaatgtaaactaaggtttgaaggggtatggcatagcacctgtattaaatataagcaaaatacaggcaaaaggatgctgtcattgtgacagaagcgggtataggaatatccggatggaaaggagcaagcatatgtggacagagaaaaagctgaatgatgtattgacagaaccaacactggcaatggtggaggatatgaaacggattgatggcgatattttggttttgggagctggcgggaaaatgggacacacaatctgtgttttggccagcaaggccatggagagggcaggcattcataagaaggtgatcgctgtatcacgtttccatgatcctgaggtaagaaaatatctggaagaaaatcatgtggaaatgatccaggcggatttacaggatttgaaacaattagaaaatcttccggaagtcccgaatgttatttacatggcagggagaaaattcggtacggacggacaggaatggatgacctggggagttaattccgtattgcctgcatttgtaggggagaaatataaaaaatcaaggattgtggtattttcatccggtaatatttatcctatggtgccattggcatccggcggatgtacggaaaaggataaggtggctccggtgggggaatatgcccagagctgtcttgcaagagagcgtacttttgaatattactccagccgttacggtaccaaggtatttatgtacagattaaattttgcggtggatttaagatatggggtactggctgatattgctgataagattatgaaccaaactcccatttctgtaactaccccttgctttaactgcatctggcagggtagtgctgctgagattggggtgagaggccttcttcatgcatccaatcccccaaagataatgaatgtcacgggtccagaggtgatttctgtaagaaaagcggctgagaaaataggtggatttttgggcagggaaccaatatttgagggggaagaaggcaatgacgcttatctgaacaacgcatcgcaggcaatggaacaattcggatatcctgctgttccggcagacacgttgatacgctggcaggcagaatgggtggcggatggaggcagaaaccttggactgcccacgcattttgaggagagaggggggcgctattaaattgaacagacatgaagaagcattaaagattctttcaaaaggaacattcataccagccacgcctctggccttgaaggaggaccgcagcatggatgaaaaaacccagaagattctgagtcactattatctggacgcaggagtgggcggcatcgcaacagcagtgcacagcacccagtttgcaatcagaaatccggagcaccggttcctggagcgtatactccagcttgtctcagaggaaataggacgttttgaagagaagcataaaaagaccattgtaaaaataagcggggtatgcggtgagacagaccaggctgtgagcgaggctgttctggcaaaaaggatgggttacgatgcagtactcttaagccctggcggcttagggcatttgacagaggaggaacttctggaacgcacaaaggctgtggctgaaatcatgcccgtcattggtttttatcttcaaacagcagtggggggcaggcggtttacatacaggtattgggaaaacatttgcaggattcccaatgtagtagccataaagtgtgcttcctttaaccggtattctacggttgatgtgatgcgcgccgttgctttctcaggacgggaagagaaaatcgcgctttacaccggtaatgacgataatctgcttgtggacctcttaacgccctaccgctttaccgtggatggagttgaacggaacattggttttaggggaggattgctgggacactggtgcgtatggacgaaaaaagcagttgagctgtttgaaaaggttaagcatatacagggacaggactgcatccccgcagatttattaacgcaggcagcggagctaacggatattaacggagcattttttgatgcggctcatgagtttggaggatgtatccccggactccatgagatacttaggagacaagggatctttaaaaacacattgtgtctggatccaaaggagaccatatctcaggaacagatagaggaaatcaaccggatatacaggatgtacccccaatggaatgatgatatatttgttgcaggcaatttggatagatggggccttgatatataagcaggcagaagggagaatatggtatggggaacagagataagaaaacggaccgagaagggggctggctgaggcagctgatatcatccctgggtccagggctcatcatagcagcaacggtatttggcgcgggaagcatcataacagcatccaaagcaggggcatcggctggatattcatatctgtgggtattggcgctggcggctgtatttatgataacttttacaaagatagcggctaaaatcggctgtgtgggcgagaagagtatgctgggacatattgaggacaattattcaagaggcatggcagttttgtttggactgtgctgttccttgatttgtacaggatttcaagccgggaataacattaacacaggggttgcgttaaacgcattgtttccgtttatgggaataaaagtgtggattattgtcagctttttgataatcatggtattgatttggagatccagcagtttttatcagctcctggaaaaaataatgacagtgatggtactcatcatgcttgtttgctttgccggtaatattgtattcttttttggccggattcattacggtgaattggccttgggatttatcccgggcaaggtaagcggatggcagattatcgtgtcaatgtctgcaactaccttcagtatagcgggagctgcctgccaaagttatctggttcaggggaaggggtggaccatggataattatgataaggcaggacgggattccacggccggaattatcattttgtcatgtattacagctatcatactgataaccgcagccaccatcctgccaaaaggagcggagattaccagtgttctatccatcgcggcactgctgaaacctttactgggagaatttgcaaacgggctctttctgcttggattttttgcggccgtattctcttctgtgatagcaaatgcggttattggaggaacgttccttgcagactcactgaaattaggaaaaaccatcaatgatttctgggtaaagatgttctcaagcatcatcattgccctgggagcctgcgtgggactgatatttggctccaatcccattcagctgacaatcatggctcagggagctaccattatcggagcgcctctggtaaccgtgatgttgatgcttttgagcagtaaagagagtgtattgggaaaacataaaaatagtaaggtgaccacagtaattggatgggtagcggttttatgggtggtattcctgtccgtcaaccagatattattgtggaatggaatcgctttgtagcagtcccccatgacttttcccattgaataccaaccggaaccgcactataattaaatagattcatgacaggtcaacggtaatttttttctgctgtgagtaataataaaaatacaggagaaacttgtttagagtgctttacacctgtactgggcgaacgagtcaaatgaatcatccggagaatacaaaatgcgagaggagcgaaacaatgagcaaagcgtacggtgagttacagacatatatggataaggccatggccatcaagacagccatgacactgtttgagtgggataatgagacactggcccccagggaagcgggagagcttacctccaaggtgatcggggttctgtcaggggaatattttcaggcagtgacctgcgatgagatgaaaaaactgctggagaaatgccggggtgataaaagcctgaccacggcagaggctgccaatgtaagggagctgctggaagagagggaacagatctgccccattccccaggatgaataccaggaattcgcccgtctcacagccagggctaccagcgtttgggccagggccaaaaaggaccaggattttgaagcgtttgccccaacccttgaaaaggtcatcggattccagaaaaagtttgcgggttacagggcaaaggatggaaagaagctgtacgatgtgatgctagatgactatgaaaagggtttttccatggagaacctggaccggtttttcagtgtgctgaaaaaagagctggtgccgtttctcaaaaaggtgatggaagagggaaagatgattgaggattccttcctaaagggcgattacccggaggaaaagcaggaggagctggggcggttcctggcggaatatgtgggatttgactttgaccggggcgttatggcggtcagcgcccatccttttaccaccaaccttcacaacaaggatgtgcgcatcaccacccattacacggactgtgtggacagttccctgttttctgtgatccatgaggccgggcatgccatctatgagctgggcataggggatgacctgacgctcacgcctgtgggccagggggccagcatggggatgcatgagtcccagtcacggttttttgagaatattatcgggcgcagccgttccttctgggttcccatatatgacagggtgcaggccatgtttccggaacagttgggcaaggtgaacctggaccagttcgtggaggcggtcaacaaagtgactccgggcctaatccgcacagaggccgatgaactgagctacagtctccatgtgctgattcgatatgagattgagaagatgctgatagaggaagatttggacgtggagaagctgccccggctctgggctgacaaatatgaggaatatctgggcgtgcggccagagaacccggcggagggagtgctccaggacatccactggtcccagggatcctttggatatttcccgtcctatgccctgggcagcgcttttggagcccagttatattatcatatgaaggaaatcatggattttgacggcctgcttaaggatggcagggtggatgtgatacgggattacctcagggaacacattcatcagtatggtaagttaaaagacagccgtcagatactgaaggatgtgaccggggaggattttaatccggaatattatgtcaggtatttgaaggagaagtactccaggttatacgggctggagagcaagggctaaatataaagaatataaaccgggaataatcaatatataagaaagcgctggtctatttaaaattagtattaaataaatcagcgctatttatttgtattagagtcctatgagtagcgacactcaaaaagatcactatcgccaaagtattccaaaagtgatttaatataattgcgcataagcggcaggctcagtgaagcacctataaaggcatttatatttccaatttctacaaattttccctggcggaattttgagacggtttgtccttccaaactgggaggaagactgccgtcttttgccttttttttgatgaactgaaccatttcctcagtattaccgtcaaagttaccattggcgattaatttgctgcaatcgtaaaagcagtctacagtagtatataagtcccgtatttgctgtctatctaaaggggcggcatttttcgtcagaattttttccatgacatacagatacatttcaatagcggaatcagcatgtctcttttcgccgtatatttcatagtccaagggaatgcttctcttgaaaacgtcctttttttgtgagccataagaagaaagctctgataaattcaatatatttataaatatctctaatgtgcctgtgggaatagaatttttgctgtctttcagaagttttgtataggtttccagtactccccataattcatcccactcatcggatataccggcttcctctaattgttcttttaatgaatataattcaggtatattttttggggctttatataggtaaatatctgcatctgtattcgccagctcatcctgatactctggattggttatatattccaaaaggcagacttgtttaccttcaacggtcatagaaagatatttggcatttatcaaaacaaattggtaaagttttggatatgaaagttgaattcccaatacacctaaaagtaaaatgtttttaaaatcaggtgtgctgttgatgccctgcgtacaattaaccatgctgtttaaagcgtaaacattaaggagcctttttattgcgcgcgggttgtttgcagtacatgttttcattagtttaaataaattatcacttaattcagaatcattcacagtgatgccaaatctccccagcatgtttgttacatatttttccacattataataattagtgggcaccatgaaaggcaattgtattattttttcaaaaaagcttcgggccttactttcccgggtctctccaaatttagcctttacccccctgattaccacgtcgtaatcaatggcaagaacgaagatacatttcttacaatccagataattttttatgatttccattagttcaactgcccggcagggatcgatccggtccagatcatcaatgaaaaagacaattctgtcatatttattttgataacagctgtaatcaacaaatgattcgaacgtatccttaaattttcggatggattgagattccgtattcaaatatttttggtaatcccattcattgtctttgctgagtgtatttgcaattatatttgtgatattattaactcctgttttttcttggaacactctgtccatataattggaagatattacctttaataacttatatatgtcttttaccgggtccgctttattgagagattgactgctgcatacatcctctccttcaaaaacctgttctattaaatctgtaatgaacattatgtttaagcgtgaggcggaatcaaactgggcgtattgccaggtgttaaaccatatggatttatatttaaaatttttggtatggtcaagctgctcccgtaccatgttcatgatactcgttttgccgctgccccattctccctggatggcaattgtcaatggggtttcacaactttttataaagttggcaagtccgtttatataatgcttgatatcaaattcatcttcgtatgcaggtaaatccgtaacggaaattatctttgtatcatttgctctcaccagcaggtcctccagtatgtattaattgatgccatatgaaattatgggttttgtaaaattatatcataacatgccatgtgtggatagaaccatcttataagtatggaataatttagatagaagcaggttgtcccttgtattaaaccgtccctgtatggtagaatgactctgagtaagaaataccaacaacaaaggagaacggatatgtctgactgtaggaagtatgtggattatataatggagcaggccaagaacctgttagccattgacagtccttccggatacggcagggaagtgacggagtacctgttaaaggaattggaggcattgggggtgcaggcccggcgcacggttaagggaggcgtcatcgctgattttggcggcaggaataaggaagacgggatactgctggaggcccactgcgacaccctgggaggcatggttgcccagattaaggaaaacggcaggctgaagctgactaacataggaggcatgaagccggccaatgccgaggctgagaatgtgcgtattattaccaaggcggacggaatctatgagggaacctgccagctggtggatgcctccgtacatgtaaacggcagctatgaaaagaccgagcgcacatgggatacggtggaagtgctggtggacgaggacgttacgtgcagggaggatgcagtgaaacttggcatcatgcccggcgactatgtgtgctttgaacccaggacaaggattaccccatccggatacatcaagagccgtttcctggatgataagctgtctgcagctattttgatgggttatgccaagtatcttaaggatgagtccgtgacacctgagcgccgggtgtatgctcactttaccatctatgaggaagtggggcacggcggttctgcctctgttccggagggtgtaaccgaagcctggtccgtggacatgggctgtgtgggagagggccttcagtgtacggagcgtgaggtatccatctgtgcaaaggacagcggcggaccctataactacgatatcctgtgccgcctggtggagctggccaaggagcatggaatcggctatgccgtggacgtgtatccacattacggctctgatgttgaaacaaccctgaaagcaggccatgacgtgcgccatgctctgattgggccgggcgtctacgcatcccatggatatgagagaagccacagggatggtgctgagaatacgttcaggctgattcaggcatatatcgggtaagtctgggaaaatattatggaatcccatccttgacagtgaaaaggaagcaaacaccgctggaagcctcattctgtaaggctttctcagcggtgttgcttcgttttaatagatagtcttttttctcctggggagaacttataacaagattcttattaggctcctgtatgtaagcggatgcttcctgagccgtatgccttttatcaataaacatgcaaaattttcatggcagccaggggatgctttacttagatttccaacttaacagcagtagttggaggtttatctatccataaatgaaaatcagcagcatccggcagctgaattagcggagaaccggggaatggggaaagcttggcagaacagattttggaacacgttacccggaaggggacagactatggtaaaatgaaatcatcaaataagcatggagcgcaggaggattatgaaaaaaggtattttgatatgtgtgctgattgccggtgtgctggtgtccaccggatgttccgggagccgtgtgaaggctcctgagcgggtgtttgaacctgaagaggcattttttgagattccccacagcagctttgaagcggagtggctggagggaggcatgaaggatgaggacggccatgtctatgaggaggtctatgattttgttctggccatggacagggcggtgattccctacactgtgtccggaaagctgatccagacctgtgaatataacccctctgagggcagctggaatgtggagcgccgcacagaggacgtaacccaggaaatggatctcaccaagtaccgctggaagctggaaaatgatcctgtgtacgaatacacggagactttcatcaaaaccggtccaaatacctttgagaccggggagccggatcatcccacgggtattcattttacagtggatatcttgtccggcggcacgaatctgaaggatgagagcgggaggactaacctgcctggcggacagtggaccgccagactctatcttgaatccgacaaccttttggggggtaacttcaagggggaggcggccattgatttgctgggcggtttttacggctacaatgatttgcggtgggtggtgaccattgatgagctaaagcgtgtggaaaaggagctgaataccacggatgaggaacgggccaatgagctgcaggagggattcagaaagttatttccagaggcagacagcttcgaggtcatggattttgaacttatacaggactgcaataaggagctggcttcctcagacttcggcgatgtgggtgtggacgcggcggcagctgcaaaggacagggacggcgcattgatgggctgggtggtgaatgcccattcaaaggacagttacatgggaaatgtggctgtctccgtggcgtttgagagcggcggcaccatccgcggcctggagttcctggtgctggaggatacgcccggactgggcatgagagccagtgaggatgtctttaaggaacagtttgaaggaaagggcggagaggctttgactgtgacggattccgggaatcccggggattcgcagatagacgccatcagcggggcaaccattacgtccaaagcggtcacaaacgcagtcaatggggccatgtactatgtacatcattacacagaagcaggagagcaggccttgtaaccgttttgcacccgcaccggctgaacggctgcatttgcgcatccgcctgcatgcaggagtccaataaaaatctcctgaatattatataataacctaaatatcgcctgccggcgcgagcacggtgcggcgatattttttgtgctgtaaaaggcatggcacataggtgtgtccttctgttcatatattaatgataggggagtgccgtgacacaggtaagcttcccatgtcagcatacaggaaggaggggattggattttgtgaataaacgcatcatatgggcggcccttaccgggctcatggtgccttatgtagggacccttgcatggacaggcacaatccggggagaggagctgcgctatgagcagcagaaggaaatatccggcagacggcggattcttttggaccggaccagcggctcctactatatggatatggaggaatacctgcccggagttattgccaggcagataccggtggagtacgagccggaagcactgaaagcccaggccattattgccaggacatacatatgcaggcagatggagggcaccggggatggggaggagatagcggaatccgccctggatatggattatctggaggcggaccagttaaaaaagctgtggggttccagccggttcccggaatattacaaaaaactggaggacgcggtcaaggccacctccggcattgtcatgacttacgagggaaaatgcattgaccccatgtattgcagggccacagcgggcatgacaaggcagggggattttactcatccttatctccagaccgtggactgtcccggggacgtggaggcagagggatacatgcagatgctttccttttccagggagtcgtttgtgtcggatatcaacagcataccggccggggaatccggctccaggaccattgaggcatcccaggtaccggacaccatacagattgtgtccagggacgatgccgggtatgtggataccgtgcagattggcagcgcgggctatacaggcgaggaggtacagtatgccctgggcctggcttcctcctgctttgtgctggagccctatgaggacggaatcagggcagtggtgaagggtatcgggcacggctacgggctgagtcaggccactgccaacgagaaagcaaaggagggatggaaggccgaagatatccttggatatttttataaaaatattgctttcatttctgaataagtagccttggtttggtaagaatagtaccgaggtgataaacgtgaaagagaaagtaaaccagatgttcaaggataagctgtttcttgtcatgctagtgttaggcctgctgactatagtagccgcagcaggagtgattaccgtacaaagaggaaaaggtaatgagacgaatccataccttgaagtgccccagccagaaatgattgcccaggagacagcaccggaaatgccgcaggtggcaggtgcctccgacgcggcaaaagagacacaaaagagcgagccggctcctaccaaggcagccgtggcccagaacgccaaccagggaaatgatctggcggcggaagctggagcgggaaaggatgcagctgatgcgctggtgctgaattttacagataccagcaaaatggaatggcccgttaagggaaatgtgcttctggactacagcatggaccagaccatttatttccctaccctggaccagtacaaatgcaatcccggccttgtaatccagtctgatgtgagtactccggtgggtgccccggccaatgccaggatactggaagtgggctccaatgaggaaatcggaaattacgttgtcatggaccttggcaatgagtacacagccacctgcggccagttaaaggaagtctgcgcggcagagggcgagtatctgaaaaagggacagaccctgggctacgtgtcagagcctacaaagtattattccgtggaaggcgtcaatgtattctttgagctgaagcatcaggataagacggtggaccccttagattatatggaatagggtccggaacattatcgggaaaacgtaaatagcggaaagtaatccgggaagagcagaaagcagacagatgttttctgttcttcctttttgcacgtaaaataagggaaaaaccgcctcataacaagaaagtaccatcccggaatgaaagtacaactcagaaaaacacgaaagtattcctccggcattgattgcaaattgactaaaaaccctgcggtattgtatgattgggctgtacaaattgaacatgcaagcttgcagcatatgtgaaatggtagaaaagcaggataaacagagagaaaacatagtgtataggaggattatgatgaataagaaaatgattgcgcttttaacctgtgcggccatgtccgcgtcagccatgacaggatgcgcttcttcaaatgcaggagcatccggtgagggaaatacagcggcagcaggggacggcagcggaaaggttaccataaaggtactggacaattacggaggaatggtggaggagatgatttccgtatatgaaaagctaaacccggaagtaaacatcgagtatgagtatgttccatcggactcctactattctaaatttacggcgctgaatgtggcaaacgaactgccagatgtggtcatgaccaactcccagttcatcggggaccaggtgcagagtggcctgctggtggacctgactgacgcagtggaaaacggacagaattatgagaaggacgcaaactggggagagacgatcaaccccactctgttaagcaactgtaaggctacccttaaggcaattggttccgactatgcggacaagctgtacggcgtgccctttaccatgactacggtggctgttatctacgataagaatgtatataaggaattgggactgaatgtgccgtccacatgggaagcgtttgagaaaaactgcgaggccataaaggcagcaggcaagattcctgtatccatgcagcagcagaacatggactggtggccgagaatcttctgggaccagtactgccgtgaggagctggacgccaatcccaacgcctttgaggacggttccatgaccttttcttctgagagcgtgaaaaaaggccttgaaaagttcaaatatatgtgggaccagggatggttcccggagtcaggccttaccggcaacagggagaccatgcagcagctctttgtgcagaaggaactggtgcaggttatgctgcagccgaactacctttcctacctgacggagaatgtgcctgagggagtggagctggcttcctatgccctgccgggcgtggagggaaagccagccagatgtctgggcggatccagcagtatctgggcagtgaccaattcctctaagcaccaggaggaggccatcgagttcgtgaagttcatgacatccaagactgcgttttcggaagattacgcaaagttcatcaaccccggacttaccaattttgagctgaccagcgacaacgaggccatgcagggatatattgatgcaggcaaaaacggtttcatccccgacatctatgtgcctgtgaacataaccacggaaatccagaacacgttcctgacggatctggagcccaattacctattaggcacctatgacatagattatgtgacggatcagctgaaccagctctatgaggagacctatctgtccaacctgaactgacacagggcataaccgcaggcagtataaccgtaggcgatataactgcaggcgatataactgcaggccgtataaccgcaggaagtataaccgcaggcagcatcatcacaggcagtttcaccagacatagcccggaaatcaggctgtaaggcaaggcggcgcaggaacaggcacaggttcctgcgccgtatctggcaatgcccgtcccaataggaggagatataacaatgaaatcatcccaaacattaaaagaaagaaaggaaatgatgacagcgctggccctgattgcccccaccatcattgtcatggtcattttcctttacataccctttgtcaacgcgctgcagaccagtttttacaagtacaatggtctgggagccctggaacattttgtggggcttaagaattatgccaaggtactggcggaccccaagtttgtccgttccctgtggaacacattttaccttatcatggtcagctttcttgccattcccatcgggtttgtgtttgcctatatcctgtatgtgggcgtaccgggcaagaaaatcttcaatgcgggtctgtttatcccctatctgatatccatggtggtggtgggatgtatatggagaatcatctatgacccaaccatcggaccggtggaccagttccttaagatggcaggactgggaaagtatgcaaaggcctggctcagccgtcctgagacagccctttgggccattgcggttacctggatatggcgctcccagccatttaatatgctgattatgtatgccaatatcacaaaaatgcctgaggatttcctggaggcggcccagattgacggcgctaatttccggcagaagctgttttacattatcatcccctatttaaagcccaccttcgcggtgctggccatgctgaccgtaaccaacggactcaggctctttgacctgatatgggtcatgacccagggcggaccgggaggcgcctccgacgtcatgacatcctatatttacacaaaagcatttacaaacagggacttcggcgctggtacggctgcctccgtcatactgatgcttattatggtggcgattatggcggttaaaaccattgtccagaagaaaagggcagggaggacttcatgatgaataagaaaaatgtatataaattatttctgtttctttttatgctgctggcattttttatatccgtataccctcttttgtgggtggtcatccagtcccttaagacagagactgagtttctggagagtatctggaccctgccggccaggctcaatttccaaaactatgccacggcctggaacgatgccggcatgtcccggtatttcatgaacagcgtggtggttaccctggtaaccactgccgtgaacctggtgtttgtcacctgcgccggatatgcctttgcaaagcttaaatttccgggcaagaccttcttttattacatgatcatcttcaatctgctgatacccacggctattattctgctccccatgtttaccatggtgaaccggatgcatctggtcaatacccttccggccctggtatttccttatttccaggggtttgctcccatgggactgattatctgccggaactattttgaggatctgcccgatgagttaatggaggcggggaagctggacggatgcagcaacatgcaggtgttccgcaaaatcatgctgcccctggcaaagcccatcctggccaccatggccattctctcggccatgcaggtgtggaatgaatacctgtgggctctgacctccattacggacgagagcaaatatacgctttctgtgggtgtggccctgttcaataagaaaacggagacagtgggttatactcctgtgtttgcagccctgtccatcagcgctcttgtgattgtggtggtatacctgtgtatgcagaagaattttgttaagtccattgccgccggtgcggtgaagggataggaggaagggtatggatttgattcgtgattttaaggacccgggaagggaatacagcgtgctggccttctggttcttaaacggggaactgaaaaaggaacgcctggcctggcagattggccagatggtggaaaaaggcgtgtacgggggctttatgcaccccagggcctaccttaagactccttatctggaggatgagtggtgggacgctgtcggggtctgtgtggaggagtccaggaaacagggatttgctccctggctctacgacgagtatgcctggcccagcggcaccgcaggtagtacctttgattatggattccaaaagccttccaggatactgtcccggggaagggacaacatggcaaagggactctgggcggtgaaaaaagatgccgggaataggggctgcgggaatgaaggtgccggaaatgagggcggcggaagtcagggcggcggaaatcagggcggcggaaatcagggcggcggaaatcagggcggcgccaacccggatgccgccaacccggaggataagggacaaagcggcgccaatccgtcctcaatgccgtaccgcgtggttaaaagagatggttttatctatgagttttatgaaaaagtatttgaaaaggccgtggactatctgaatcccgaaaccattgcctccttcataaaactgacccatgaggaatacagaaagcggtggggggaggattttgggaaactgataccgggtatcttttttgacgaaatttacatgatgggaaatcccctgccctggacggaccggctgcctggacggttccgggagacatacggttatgacatactggacgagcttccttctcttgtggacggcgtgtctgagcgggacaaacaggtgcgaaaggattatttctccctcgtaaccgccatgtatgaggaagcgtttttcaggcagatatcagactggtgcgggaaatacggtcttaagctgacaggccacacagaggagtttttgtgggaacatcccagaaggcagggcgattattttaagaccatgcgccatctcatggtgccgggctctgactgccacgattaccggtaccggtatcccagaaggattacatactgcgagcccaagtattctgtgtccgtggccagaatatatggaaaagagagggctatgtcggaagccctgggaggcgcgggatggaactgcaccatggaggaattcaaaaagggaatcaatactctggccgccatgggaaccggcatgttcatcctccatggattctactacgagtgtgaccaccagggttcccagagtgactggcccaccagttttttctatcagaatccttactgggactattttaaaatatttgccgactacataaggcgtctatccttcatgaacagccagggaaatcctgtggtagattacgccatactgtatcccataggggacatggatgaaaatatggagaacggagaggaaaatcccgcaggtcaggccataaacaacggattccaccaggccctcaactgtatgattgagcaccagctggacacggatatggtggacgaggaatccattttaaatgctcatatatgtgacggaaagctgtgcctggggcagcagagttttaaagtgctcctccttccggaagggggaagcctgatggaagaaaccgtggaaaagctggaagcatggacaaaggccggaggcagcgtcctgttttataggaccggtctggctcacgaaaaccggtccggcgaaaaccggtccggcgaaaacagggctggcggggacagggcgaacggatgcagcgtaaacggatactgggacacggtcctcaggggaaatgtacacagcatcagccgtattccgcaagcagcagccggactggctgcgccgtccgcatccgtgatttacggaaatcccggaaacatctttctgaatcatagaacggcagggaatgttgactattatctggtggccaacagcagcgatgagaggcgtaatctggtgctgtctttcagccatgcttctacaccggtccttttggatattgaaaaaggggatatggtgcaggctgtatacactcaggcgggcaccgcccaaatgtgcggaggccgtcaggcaggcagcggtgtcctgatatacatggatttggaaccgggagaagctgtctacgtactgtttggtttggaggaagatacaatcagacaggcaaaaccggcccttacgggggatatccggtgggaggaagagtggattacaggaaaatgggattttcttcccctttccccgtccggcccgaatcatggagataatgcacacaatgaagagagtacggatctggaaatcccaatcgcagaatttacatctgatgtatcctccggaacagagaccatccggatctgcaaccaatccggggaggaggggagctgcggccgccatatgagcctttggaatggacggtggattacacgcagacgaagctggaatgaccagctggatgcatcggatctgtatttcagaaagacggtattcctggaacatgtgcctgaaaaggcggagttctgcgcggcagcggtggattcctttgagtgctttatcaacgggacaatggtttacaaaggaatcagcaacggagagccggtggtatttggtgataagggccagctgacccagggggagaatattctggcattccatgtaacaaaccgcaacccgcttcatgatgtatatgtctgctccgcagaggagctgcccccagaccggtttatttcccttcttatggaaggaatcatcgttcagggaacaaacgtggaagttgtgaaaagcgacagcacctggattgtaaatgacagtctgattaaagggtgggaacagccggattccaacgggcggtttacggcagccggctttgatgtccggaaggtcctgaatttcaattatacaggtctggagcatgtgtggctgaaagcctgggagaggggaaaaccgcctttgaagccgtggggggaccttccgttatttgggcagaccctgacctatcccagaaagctctggtatacagtcacaatacctgccggagcgtcagttctatatgagcctgttacagccggagcagcggtctgtatgctggacggcaaagaggtgcattgggaaaatggcgtacacatactcccggacaatgagcgcattcacatactcaccatacagataacggcaggcggatgcagcgacggtctgaaacagccaatccgcgtaaccatgaaggcagttgctgtcaatctttcggactggcgtatgctcggacttccgtggttctccggaaggtgcaggtatacaaacacatggtccgtggagcaactggagggcacgtacatgctggagcttggcggggtaaaccactgtgcccaaatctggatcaacggcaggctggcagatacaaggctgtggcgtccctatagggcggacatcacttccctgctcaggcccggggaaaatgagattaccatattggtatccaacctggcctccaatgaacggcgccacatgctggtggacgagggaatggccctgggatggaaccggtactggaacgaggacaacatggaccgggacagccggaattatgtgtcaggccttctgggaccggtaaggcttcttcatgtgatatccccaaaaccataatatccaccagaacgccacgcagggtgatatggcccgtggctcctatgaccggtatgagcatcctgccgtggccttcaaaggagttggcaaagcccgggaaggtaatggtaagataaggacgggcaggtccggccgcctggtccggtggatgtatcagacggagcaggggagaacgggccgccagtccggccaggctcaggaataccgtgaagatacaacctgctgtcagtgagacaggacagaatggcaccctgggaagcagacagagcctgtataccggttctgcgtcgtgcggcagtatacgggcttatttattctcagcctttcttttcctctatatattttagggtggaataatagagagcaactaacgctgatgagagtaaaatgcctgccacgatgtctgtaaaccaatgaactcccgatataagccgtcctattactgttactgcaatcatcaaaacagaagctatatctattgtccacagacaaacttttttgtcacgtaaataataatgaaactgcagcattgctgtggacataatacaaattacaatcattgtatgagaggacggaaatgatgcttctaaactttgggagagaattatgggtctataattgatgattacaatttcaaagaaaacataaattataatgacgataaaataaaatgcaccaagcaatagaatgcgtggatcaacgttccaaatgcttttacgctgtatgagctggattagtcccaggattgcaaaccccagagcaattactatggcaacaatacctaaccagtcagtaatgttataccaaagcaggttcactccaaaaaggttaaatacaaactgattcagagaagccagtcctatcgtagactgctccggtccgacaggctgtacatcaatggtcttgattagaacagtaaaaagcataaaaatcagaaacagaattcctgttgtgatgatacatttctttgatttcttttgcatagtatacattcctttcttttgctgtgataaattacttgccggctccccttgattatctatccatgtagcccggagcacaagaaacctaccgtcacaatagagaaaaagctccgacaccaatcgtgtcagagcttgtttttaaaggatgtatgactattttgtcctgctttgctgcagcaataaaaatatttttactgcaaaaaacaaaaatagcagtatggttacatatggttctcttgccgcagcaaataaacagattgccgcagcccctgttgcagcagaagcttttgagataatgccacacaagcgttctttacccaaaaagataaaagcaagtctggcaattccaaacccaattatgagtaaataaatagcccaatatattccaatatctatatttgataaatgagtgattgacagaagatttacatgataaaaatggctgccttggggttctccatagattggtaatacaataagtgcaattgccagtacatctattattccgctgataatgttatgaatcctattaacattagagtggttttcggcttctgcaagggtaattagttcttcactcgatagcagctcatctatggttatagaaaaaaatctggaaatacatttgagtgactcaatgttaggatagcctttgccgctttcccattttgaaattgctgttcgtgatacatataattgctctgcaagttgttgctgcgttaaatttttcccgattctaagctgttgcagtttttcgttgaactccatgcctgccctcctgcctgttttttactttcatacgtattatctctagttatatacggacatacgaataatagcaacaaaattttgtaaataatatgctctgttacaatcaatactatgccgcatatgctcatatccaatcaattttgcagaccgccacaattacaataaggacgtattactatatccgcaatatcagagacaggctgtgtggctgctccggctgcaaggtttaccttgttcttgttgacttcgccggattgtagtataattcccttagttaaaagcaagcacttcatatagacacttataaatgcttctatgacgatttaggggctttaaatcaaaaaaacaggaagaaaccaaaggaaggcagagtaggatgcgttttgaaaaagtgggaatggaaaagctggaggacctggttaagacgagaatccaggtcctgagggcggcaaacaaactggatggttcggcggatatgggacagacggaacaggaatcccggacttattatgaaaaaagtctggaggatggaagccatgtggcctatcttgtatacgacggggacctgattatcggaaccggaggaatcagcttctatcaggtcatgcccacataccataatccaacgggaatgaaggcctatatcatgaacatgtatacggacccggagtacaggagaaaaggcattgccatgagaacactggatttgctggtacaggaagcctggggacgcggcatccgtttcattgcactggaggccactagcatgggacggccactgtatgagcggtacggcttctgccggatggaggacgagatgtatctgccggaataacctgccgtaaggccgtctgcaagcctgtctgtataccacaggtatatagacatccggtaaaatccatgctagaatcaaggcataaaatgagaaagggaggaaatgacatgttccgtttagacgcgcagaaaagccataaacatcacgtacagaaagacgctcacaaacagcgttttgtttggatgcccttatggtatgcgcatattcaggaaccgttcatttagatgaatcatcttctgaattcctttagccgcttgtccgtatgggcaggcggttttttagttccatataaggaaaatggcagctgtggcagatatggaaatgcaccggattgtggttccggatgatgcgggttcaaatcccgtcggccgccctctgcaaaaaaggaggacgaagatgaattatccagtcataaatccggtggaaacaggccggaggattaatagattgagaaagtcaaagggactgagcgtcccgtacctcagggactatttcggattttccaccaccaacgccatatacaagtggctgcggggagacacactgcccagcctggacaatatgtttgcgctgagtctgcttctgggagaatcggtgaatgacatactggtggctgagtgcggtgatgaaaggacggctggttgagaaaagagaaaaaaggaaagaatgtgtctgtagctcagatggaagagcaaccggcttttaaccggcaggtcctgggttcaaaccccagcaggcgcactgcgtaaaccggtaccggaatgactcattttgtggtacaatggttcacagaaaggatgtggtatatctgtgatacgttatgcaacgcaaaaggatgagaatgctatatatgaactgctctgtgagctggagggaatgagcctggacaaggagggattccatgaggcatacagggattatatgaaggatgacaaaatgcactgcctggtggcggagatggatagagaggtggcgggagtcttaaatctgcgcataggcaccatgctgtgcagatgcggtaaaattggggaaatcgtagagctggcagtgagaaacagcatgcgctcccaggggattggccatgggctttttcaggaggcgtaccacattgcccgggaagccggctgcgtccgttttgaggtcagcaccaaccggacaaggctgggcgcccaccgcttttatgagagagagggaatggaacggagtcattaccggttcatccggtattttccgatagaaaagtgaattgtatctaaatgaagtgaagcgtgtataaaaaaaccacgttgtataaaaattgcacaatgtatatgactccaaagtttgtgtatatttgggtattacagtgttccgaaaaaaatggtatagtaatagctgcaatatggctgtaactttttccgtgaaggccattcacggaaggttgcggcttttttatttgcacaaataaaaaaacggaggttattatgaatcaaaatacaaaccaatatatggcggaagaatccatcggaaagctgatgctgagattttccataccctgcatcatgtcgctgctggtgtccgccctctataatattgtagaccagatatttattggacggggcattggttttttgggaaacggcgccaccaacgtggtattccctgtgaccgtcatcgccctgtccctgtctcttttggtgggcgacggatgcgctgcctatctgagtatctgccagggacgcagggacggggaacatgcacacagaagcgtgggcaatgcagtggtctttatcactgcttccggaatcgttcttaccctgctgtacgcctttttcagagacagtatcttgtgggggttcggcgcaacagagaacaacataggatatgccagggaatatttcttatatctcattccgggaatcccctttttcatgtttgccaatgccatgaattccgttatccgcgcagacggcagcccgcagtttgccatgttttccacccttataggctgcgcgctcaacgtggttctggaccctgtggccatctttgtgctgggatggggaatgaagggagctgccctggctaccatcaccggccagattgtatccgccctgttggcagtttattatctgtttaggcccaaatccttccgcctgaagcgcgtaagctttaagccggacgcagagatactgaagcatgtcctgcctttgggaatcagcagtttcctgacccaggtgtctattgtggtcatcatggcggttatgaacaatgtgctggtaatttacggggccgggtcaaaatatggggcggatattccaatgaccgtggtggggattgttatgaaggtattccagatcgtgatttctgttgtggtggggattgcggccggggcccagcccattgtggggtataactacggagcaggattatggcgcagggtgaagctgattttcagaaccatgatggcagctgagttcagtgtgggtctggtgtcactgatatgttttgaggtatttccggtgcagattatcagcgtattcggcagcgaggacggtctgtacaatgaattcgcagtgctggctttccgcgttttcctgggggggattgtgctctgctgcattcagaaatcatgcagcattttcctccagtccatgggaaagcccgccctctccatgctgctgtcccttctcagggactttgtgttaagcgtgcctctgaccctggtgctgccgcgattttttggggtgacaggcgccctgtactccggcccggcggcggatgtaatctcctttggggcggcagtgctgtgcatggcagcagtattcagaaaattaaaccgtctggaagacggggaagtagccctgtccggcgcatcccagaggggactggctgtggaacgaaagatatgttaaaatcccccttccgccacccggcgggccccacgtgcagctgccgcagggaatgtgaggcggacgtgaagcagtgcacttttttgcttttcattccagcggtaatatagtacaatgattcccatagctgggaaataggtggaaagggaggcgcgtttggatggagacggagagaaaccaacaaaggaaccaggacgggagaacagacggggtaagagacggtgacagcgcagcaaaacgcatggaggagggacgcctgtattttccgggcgacgaagatattctgaaggaacagatggaatgtatggagctgctctatgattacaacgcaaccaggccaagggaaagcgccaggcgcaccagccttctgaagcagatgtttggctccattggccgggactgctatattgaaccgcctcttcacagcaactggggaggcagacacgtatatatgggggattttgtctatgccaactttaacctgacactggtggatgacggggagatttacattggctcccattgtatgattgggcccaatgtgaccattgccacggcaggccatccggtggaaccggggcttcgcaggaaaggaatccagttcaacatgccggtgcatatcggcgagaatgtgtggataggggcgggagccgtggtggtgccgggcgttaccattggagataattctgtcataggagcgggaagcgtggtcaccagggatatccccgccaatgtggtggcagtgggaaacccatgccgcgtactcagggagataggggaacgggaccggatatattattataaggaccggaagattgatatgtaagattgcggcaggtcctggcaggaggtaacgtgatgtcagatatcatatataaaatatttcccagatactattatcctaaatatacggatgatcagataaaacgtgctgccggaatgcttaagttgacatccaacggcagaattacatttaccaactataaaagcgtgcagttcattgactgcgcaggagaattggagcacatattttgtccctggtgcggacgtgaagtggatagggagttttggcagaaggccatggacaccgcatatgacggcagtgcatttaaatacctgggaatacggatgccctgctgtcaccagccgtcctcacttgaggaactcatctatgtgaaaccgtgcggattcgccacatttgtgattgagatatggaacccgcaggagatgccgtccgttgttgaattacacgaaatggggaaatgctttgggaatgtccactttttcaggatgatttcggcctgcatctgagagggtctgatacgtaaaaaagcgtgtcccccatgagatattccggtgtgaggacacgcttttaaactgaatgttatttgatcttacccagccgctttttcgtatacttcttagccttgcatttacagtggccgcatcccgcggccagatgcgtggctttttttactttcttaaaggaatcagcaccttcttcaattgctttcttgatatcgtcctttgtcaccttaaagcagggacatatgtacttatccttccccatcacagcaccagtgagggagcggcgtaaacccttgccgccaattcggaatccagcatatagagtcccttgggatcatggccgaagaggtcaaagcgttttaccagttcgctggcgttcttctcctcctcgccctgctcctttacgaaccagtccaaaaactgcatggtgcggaaatccttgacagagtacgcggcgtcataaatatcatggataagcccggtcacatagttttcatgctccagcccggcagtgagaggtcccctgaagtcctcaaacaccttgtccggcttggcgatggcctccagagttattttctctccgttgttctgcaggtactggatgaacagcatggcgtggtcacgttcctcctgggcctgtacctggtaccagttggaaaagccgttcagctccgcgtccttgtagtagttggcaaaatccagatacagataagcggagtaaaattctttgtttacctgtgtgttgatcagttctgctacctttttatctaacatgtacagcctccttcaatatataattataattgaataattatgttcagatgtatctccatcatacttgttttatatgcctttggcaagaaaaatctgagtatttgggacgttttgggggaatttggatccgggttttgcacctgctttgtcagaacagctcccggccccacgcctcggccaggcggtccagggtgaaaaatgcattggcagggctggtggatggacatttgacggcttcccttcctgttgtttcccggcagtatttgcggtacagctgaaaggccgtgtcgccgttggcaaggattgtttcgatgtgggctgtgcggagaatccggtttaggtccgtgggtatcacattgcggatgctccggtcgctggagcccttgatgtcacaggcagccaccacgtcccagagcgcgatatgatggcgcatcagcagtccctttttatcctccgtggtctccggcacaggttcttcaaacaggcgggccatcagtttccagaagcggttctggggatggccgtagtaaaaattctgttccctggattttaccgaggggaagcttccaagtatcagtatgcgggatgcctcatcgtaaatgggacccagcgtgtggcatacccgggtgtagcctgccggaagctcatcctcaatgtaatcctcctcgctcagctttttcctgagccggctcatgggggctccgattcctccgtctttagcaatggatacggcaaaggcgttgatcttcagcttgttttcttcataaaggtccatgctctggtacaattctttataatccttaaggagacggagcttcagctttaccgcattggcctttttccagtccgtgctcaccaggctgcccttccgtttcatatagtagtaaacaggagtctggatggccgtgaaccgcccggcgtaccggatgaagttcaggttaaataaaaaatcctcgcaccagcgcagatcctcatccatctttagctgatgctcctgcacaatgctgcggcggtacagtttattccacagtacgccgtaataaaagtcagccggttcccgcatcatatattccgcatactgggccctggtaagaagcccccgttcacgtatgtgctgcttttccgtaaacacagccccgtctacacggtaaaagtctgaaaccaccaggtcgcagtcgaatttcctggctgcatggacaaagctttccgtggcatccggggtcagccagtcgtcactgtccatgaactgcaggtattcgcctctggctgtctctatggcctggttgcggctgtccgataccccggtattttctttgttgatgacgcggaagcggcggtccattttttcatattcccggcagatttccaggctggtatcctggcttccgtcatttactacgattatttccatgtcctggaaggtctgttccatggcgctgttcagacagcgccgcagatatttttccgcattgtagacaggtatgataagtgaaacaaaaggcatgtcagtcattcctccggattgttgttgtccttttcgtatggcacaattcagccacaatttagtatagcacaatttgaaataaaaatgttgactggagcctttaaatctgctattatcaaatgcagtaatatttaagcgaggtgtctttttgttaattgtgtctgtttgtggaagataaataaaccgattgtgtacatgaaatgattgtccgcccggcgggcctggttttgtgtactccggaatccatgacagatgaatcatatggtatcgtttggaacctatgcgacattgcctgtagtggatgtccgtaggttttttttgtcttccatttttatgtttgaaaccgattcgatattgtgagatattccctacagggaacatggatgaacaaggaaacagagaggaaacagacagaacaatgaacggaacatttgaagcatataagacagttgcatttgatatcataagagaacagctggcagaccttgccaattcagcagaggccagggagatggccagggggcttgtgccctgcatggaagagggggaactgcgaagaagcatgagagacaccacccaggccaggcagatgctagagctggcgggcacgcctcctatgccggccatggaacatacggcggagtttgtggcccggtctgtccgcggcgagctgcttacgccggaggagatggaggaaatcggcatgttcctggctgcggtcaggcgggtcaggtcatatctggacaagggaatgtcctatggcattccgctgtcctgctatggggaaaacctcaggcttatgacggagctgaaggaggaaatcgagggagctatccgccatggcagggtggacgaccgcgcgtccaatacactccgggatatccgccgggacctgcagcttctggaagaaaaaatcaaggataaggcggaagcgcttttaaaatcacagaaaaagtttatggcggaatcctttctggtcaccaggaacggacggctgtgcctgccggttaaaaaggagtataaatctaaaataccgggcagtaccatagaccggtcctccagcggctctacggtatttatagagccggaaaccattgccaggatgcaggatgagatagagggactcaggattgaggaggactgcgaggagaggcgtatcctgtacacgcttatggacaggattgccatggaggaggacggatttaaggagaacctggctctgctggcaaaactggattttgtgtttgccaagggaaagctcagcgcgcagatggacgccagggaaccggccgtcaatacccagggcatcatatgcctgaaggaagccaggcatcccctgctgccgggggattccaatgtgcccctggattttaagctggggggagaaacacggggaatggtaatcacaggccccaatacaggagggaaaaccgttgccatcaaaaccgtgggactgtttgtgctcatggcatgttccggcctgcacctgccctgccgggaggcggacatcgccatgcgcaacctggtattatgcgatattggggacggtcaggatattctggataacctgtctacattttcagcccatatcaccaatgtgctggagatattaaagcgggccaccggggagagtctggtgattctggatgaactgggatccggcacggatccggctgagggaatggggattgccattgccatactggagcagctgaggcttcggggatgcctttacctggtcaccacccattatccggaggttaagacatatgcgggccgccatgcagaactcatcagcgccagaatggcctttgaccgggaaaacctgcgtcccctatacagactggagatgggaaagaccggggacagctgcgctctctatattgcaaagaggctgggcatgccggaggatatgattcggacagccgcctctgaggcttacggagacgggggagagctggagaagccgctggaaaagaccagggagaaaacactgtataagaccagagaaaaaccgcaggaaaggtctcaggaaaaaccgctggaaaaatcaccgggaagacaatggccgggagggctggagcggattttggttccctgcattgtccccataaagagaaaaccggctgccgcaggcccggaggaggggtataccagaggcgacagtgtagaggtccttcaaaagggggagattggcattgttgtgaggccggcggatcagaccggaaatgtccttgtccaggtaaagcgcgaaaaacgcctggtaaaccagaaacgtctgaaactaaaggtgagagccagtgagctgtaccctgaggattatgatttttccatcgtgtttgacagcgtggaaaaccgcaaagccagacatcagatggagcgaaaatatgtgggaaacatggaggtgcgggcggaagaatagccggccctacaccccgatggaggatgacgccctgtactcagtgggcgtcatctttttatatttcttaaagcatctgctgaagtaattcaaatccccaaaccccacataaaacgcaatgttctggatagacatgccggaaaatgagagaagtccggcagccttttccaccctggctttagtgataaagttggatacagagtcccccgtctcccggttaaacaggcgggagagataggaggggcttacacggatgccctttgcaatccctgcaagggtgagctggtcagccaggtggatgcggatgtaggtgacggccttgcggaccaggggagagtactggtccagacggtttttacggacaaagcggcagtaggcgcttatcatctgggatttacattcctctgcttcccgtatgctgttggcattttcaatgagcatggcaaagttggaggagatgatgtccagatacacaggatggatgccggtggtctcagcgcttttgcggagcatggtattcagggaaaaacccaggttctttgccgtgcgcagcgggtcctctgtacggacaatggaccggctctcctgtgagaactgcctgtaatacttaagagccagatcctggctgccctgggcgacctcctgcaagagcagcttttcataatagtaccggtgttccagaagttccatggatgcctcgtccacaccctcggccgacaggtttgatatctcctgggtgtaatgtctctgcggttcatagtggagatagggaatttcccggtccgtgccggtaatgaccctcatggcggtccgcatcacttccagcatctgagagctgcctactacgggcaggctaaggcagaactggctgaaggggacaagcagggacagatttttcccgttatcctggagaatttgctcgcaaaaggcagtatctgccggatgggagagatagggaccggcgatgagaagctgagtccccccgccatacaggaacaggttaaaatgaagatttataaaatccgttatgtgatacagggttcccgtctgtaaggactccgccatggaacgggttatgaaaaaggggaagctgtttttgatgaaatccggaaagtattctttgatgctggtttcgatggcttctattcgcccgggacacaggatgacagggaccttcagcatgacctctataaattgcctggatatgagcgctttttcatgttcttccatcatatttctccctgaatgatatattctataggatttgcacaaaaaaataataaaatattgtacgaatcggctaaataactatgacaagatattactaaataatattatataatcctaactctttaaaatcaagtgtgttagaatattgttacaaacataaagccggcaaacaaaaaatgaaaatgtgtgaacatagggagactatatataatggagaagaataaaagtgttgtaaaacagtataacaacgcgaaattatggcagattgggttcttttcactgaataactgcgccaccaatatcgccatgttcctgatgatgcagtattcgtactttactcagaatgtccttgggctggctgctgccattgtgggcctgattgccacgggaacccgtatttttgacgctgttacggacccgctggtgggatttttagtggaccggaccaacggccgcttcggcaagttcaggccttacatgcttgtgggcaatatcattatctggtgcagcctgattgtgattttcaatacgccgtccggttggggaatttccaggaaatatatgtttaccacggtattttatgttatctatattatcggctatacctgtcagaccgttgtcaccaaggcaggccaggccgtgcttaccaataatcccaaacagcgtcccatatttgccgggtttgacagtgtactgacccagatggccagcgctcttgtgcccatgctcatcaccaccatactggctgaaaaatattcggttggggaatttgcgggtgagaacggaaagggcctgggtatgataaatcctgccatgtggaaggaggcggctgtcattcttgcggtgatatcctttgtgtttaccatccttgccatcatcggaatcagcgcaaaggaccggcctgaattctttggccaggcaggttcccagccaaaggtaaagttcagggattacaaggatatcgtcatgcacaaccgtcccattcagatgctgattatctctgctgcaacggataaactggggcagctgctcatgagcggcaccatgacatatctgtttgccaatatgctgctgaactccagtcttcagggggtattttcaagtatcctcatcgcgccgttagtagccatttccatcggcggtgtgtttgtgtccagaaggtttggccttaagcgcaccttccttgtgggaacatggggatccatgattatgctggccatcatgtttgtggttggacctgaccccaaagtactggccgtattcctgggaatgttcctggtgcagaaatgtctggccagtatgggaaactcaggtatcatccccatgattgccgattgtacggattatgaaatgtaccgcagcggccgttttgtacctggaatgatggggaccatgttctcctttattgataaaatcatatcctccttttccgccatgattcagggatttgccctgacgttggcaggggtgggaaatgtggtgataaagcccaatgaacctgtaaactccacctttaacatggccatcatggtatgtttctgcatcgtgcctatcctgggccatatcgccacaatcatagccatgcgctggtacaatctggataaggtgaaaatggctgaaatccaggaagagctggaaaacaggaaggaagtacgggccggagagggaacccgcccggacggcgctgaggaagcagctgcaggagcagtgtaataaaactgagaaagagcgtaaacgcaggaaggaacggaacgatatgaacaaggcatcagctaacattcgtttttataaaaatgaaaacggtcctgtcatcggagttaccgtaaggccggtaattgaaaaagacgggctgtatttcagggacctgacaggggatgggaggctggctccctataaggattggcgcaacactcccgccgtaagggcggcttccctggcggcagagttatctgctgacgaaaaaatcggcatgctgtttgtcaattcctggaaaatgggaatttaccaggaggacaggacaaaggtggatgaaagcggtcttctcaacgaggaaattgtggagcaggacgagtctatctttaatgtggaaaagacttacggaaccacatacacattaaaagaaatgggtatacgtcatttcatcctgcgtcagaatccggggccgggagagctggcggactggattaaccagcttaacatggtggcagagggaaccggccatgccctgcctgtgatggtcctttccaattccaggaatgagcacggggaaattgtgttcggcatgaacgatgcggcaggcgtgtttgccgcctggcccgggaccttgggaatcgcggcagctgtcaggggcagcggaccggaactcatagacagctttgcagagtgtatccggagggaatgggatgcagtgggaatgaagaaggggtatatgtatatggccgatgtcatgacagaccccagatggcagagatcctatggaacctttggtgaggatccggggactgtgtgcaccatcatggagcgtctgattcccggcatacaggggagcagccggggcgtgacaagagacggagtcgctgtcaccatcaagcatttcccgggaggcggagccagggaaaacggattcgacccccactatgtccagggacagtggaatgtgtaccagacagaggacagcctgcgcacataccatctgcccgctttccgcacagctatagagaaaaaggcttcctccattatgccatattacgctaaaccgtcagctgccaagagcaggccccagtatggtccgggcggagatgtcatggagatggagccggtaggatttgcgtttaacaggtctttcatacaggggcttctgcgggaacagatgggatttgagggatatgtgaacagcgactccggcatctccaacaagatggcctggggggtggaggagctggatgtgccttccagaatcgcgctggctgtcaataccggagtggatatcatcagcgggtccttggatgtattttccgccagggaagcatatgagcgcggcaggaacggatattacacggcccagggccatccggtgccccaggggtaccgggccggtgatctggtgctgaccgatgaggctctgacaagggcggtgaccaggaccctgaaggaaaagtttgaactgggcatgttcgacaacccataccgtgaccctgagacagcaaagcaggtggtagccacaaagaaacactgggaggacgcttaccgggtgcatcagcagtccgtggtgctcttaaaaaacaaagagggcctgattcccctggatagggagaagacagcaggcaggaaggtatatgtggaatgctttggctgcgaagcggaggctgcagccagggaaacggacgcggtcagaacgtcctttgcaggaaggtttcaggcggagctgacagaggattacagggaagctgatttcgctattctgtttatccgtccaagctcaggcgaatacttccattccaccaaggggtatctggaactggatatctgtgagaacaagcaggtgcgggatgtggacagccagggccgcccggctgattccttccaccaggagaccactctgctgggggcagggagaatccgggaaatttacgagtcccttcacagcagggggggaaaggtgatttccaatattaatttcaccctggcctgggaagtggggaacgtggaaccctgtgcggacgcccttctggcaggatttgacacctatacggacgcggttttggacgtcatcatgggaaggtgtgcacccacgggcaggatgcccattacccttccaaggaacgacagcgttatccgggtggaccgggacggcatatgcatatcccgcaacgacgtgcctgggtaccacaaggacaaatacatgccggagtccatgaaggatgaaaatggaaaggcttatgcctaccgggacagcgaggggaattactatgagctggactttggactgacgctggaatagaaaaggtgaattggcatatttgcacaaaaaggaaaataaaattagtgcacaattaagcgcgtgtcactggtgatgcaggcattaactgagagaggacattggagacagtgttcttaacagttagtgccttatttgtgtctggacagccagggggggaggtaggacgaaaaagacaagagagaaggaacatgaaagacaggatttttggtgttcttcagagagtgggacgcagcttcacggcttcccatcgcagcgctgaccggtattacagcccattgtgcgttccttcctatcgcaacagcggaaggtttccggtcagtttattaaccaattttttggcgccgcagatgcccaccccaaagtactggaagctgtcgccgtctgtctgggcggcttttgatgtgaattcgtcgtagtcattgcagctctgcgccacattggaaaaatccactactgtcagctctgaaaagctgggttcataaagcttaagcctcagctcttttaatttttccttacttgccttcagaatgggaaccggaatcgcgataatgcccagatgggaccttccgttccggtcggatacatccggccccactgtttcggggagtttttttcccagggtgattcccatgatcccggctgtattggctatgatgccggtgggcagctcctcgtcgattaccattacacattttttattttggtggtccatatctttggttctccttttttcgtggttttctgttcggataaaaacaatccggccagtgtcatgataattcccaatgcagccggtattgttaccggttcttttaatataagggccgaagtcagggtggtgatgaccggcaccatatagatgtatacgctggtctttacggggcccagtatctttacgcctgtgttccaggtcacgaagcacagtgcagatgcgcccagccccaggaataaaagattcaggatatttttcatgtcagtaaactgagccggtgtcacgtaaaagtccatgaaggccagagccggcaccataaatagaattccgtaaaaaaaggtccttctggtactctggacagtgccgtggcccaatgcgctgattttttttgtgagggtggaatacacggcccatatgactgcggcagccacggccaataaatctcctgtggggttaagggataaagcggcctcattgccaaagctaatcaggctgatgcctgccatggccagcagaaatccggcaaagaaccggaagcgtggtctctctcctcccaggaacatccagcccaagatggcagtaaagaaaggtgcaatggagatgatgacgcccacgttggatgccagggtataggtgagggcgatgttttccaggagatagtacatggtaacaccgcagaaccccgccgctgcatagagtccctcctgccgggcggatgtaaggcgcagggaacgggggcagaccagccacagcgccagatatcccatgacaaaccggatgaacaggatttccacagggctgaatgtccgaagcaggactttggtggatatgaaggtggttccccatatgaggatggtgacaaatgcggccagatggcctgcggcggtacggttatgattcatgataatgctccttttgttcttcatcaggttctgataggaatattttctgatactgtctgggggtgagcccgataaactccttaaagaagttggtgaaatggctctggtctgaaaatccggccatggccgctgcttccacaggaggcatgccctgttcaaggaattttttggccttgtccaggcggatcgtctggaggtatcggtagggagaaacgcccacctgctttgtaaaagagcgcagcagataggattttccaaaggtggtcatggacagcagctcatccaggcttatattttctgaaaaatggtcctccatgtaggtgcacaggttttggatccggtcatcgggcctggatatatcctcttccttaaatggggcggcatattcctggagcacctgctccagaagaaagaacagggcttcttctttttcaagccttgtggcccgccgcaatatggctccgtacagggcggatacggactgggttatgtcgctgcggtacaccacattccgggtaaagcggggcataaattcccggcctgtgatttcccttaccgcctgctccatgacagagggatcgatgttgaccgcacggtagtccaacggttccccgtctatgggcgcgcagtaatggttgtccctgggattaaagagaatcaaatccccggcgctgacatcatactctttgttacggctccagagatgtctttttccgccctccacaaagcctatgacgtaatattcatggaaatgattggggaatttctgtacaaccccgctcagattgtaggcttctattttaaggtctttatcataatagacccggcgctgttcctgctcctgtatcattttgctgctccttttaaactgcttttctgctattttaacacaatgggaagggaaaatcttgcaagatatgacaccagaatggattgaatttagccgctgcattttgttttttggaaatacaggcgcaaaaaaagatgaacagcttcacatggcgtcatgtgttctattcatcttttgccgtctcttttactattttcaaaatatcattgggcgtgcagtccagacaagcgcacattttggcaagaatggtaaggtcaacgcgggaaaccttgttcttgcagtaattattgaactgagtccgctgcaggccgcattcttcacacacaaagtttttacttttatgtttttcttttagcagacgctccaaatcaatctcaatatgcattccgtccccgcctttctgtataagctccagataagtatatctccggatgtattgaaatataagctgtattaaagtacaatatgtataataatacaggtgggggatgaaacggaatgagaaaaagacggatgcatgcatcactgattctgatggctctttgtatatatctgcagtggggaaggggcgtgtcggtgaggaataccatatcttcctcccgggatggaaagaggacagaacacataaccattgttgcgaataagctgtacataggagataaggaggcatttgccggggatatgattgagacgtgtatcaacaatgaattccgtgatgtgcggttcagctatgacatgggatatccggtggaaatcactatggacatctataccaatgatacggccaggcggctgggactcagatgctgtgaggtacggtatgcccaggcggaagaggaccggtaccggtataatgtgaaggatgacagggaacggtttgtgatgacggtgaagtgaaaggagaaataaaaagcccggattattataagagataaaatacccgggctttatgtgcggtaatgattattggaggatattagtccttctctctatcctttttcttcataaattcaaagattccattttcatccagaccgggattggcctgcactgcggcgtaaatccggctgacgcaatccgggctttcctccagcaactctgctgtctcctccggggaaagtccttttttcattttcttcatgaccagagatacgagcttggtcatttctcccttttcaattccatcctccataagcatctgtccgagcagggtcatattaatcttctcctttactttccttaattctgttttgtcgagaaatttgatggccagggcataaaacatggcttccatgcggcgaaggttttcctttgatacagctacatggtctgattgaagaatatcaattaatttttatccgcgttccggtccttgatacggattacctggatgcggtatacattgatgccggtgacgagttcctatttaattcgcctgacatgggaagtacatagaactgtggtaataacagggcagttatatatcaggcttaagtaagcttcgtattccctgaaacgccgcagatccctggaagtaatgctgtcactttcaaactccagatgccgcagggagacgtcttccatcatatagttaaaatcttcttccatcctgcgaagttcaaggtgaatctgttctgtgggaacaaggccggtaatccgacccctgacacccaggtatggaagaagatcctgaccaaaaaacatggcagctgtttttaggactttatcctccagctgattgggggtatcctgtatttgatggttagggggtaacgtgtgttgctgcatgagcctccttttccggtaaacattaaggaagctattcctattataatccctttttatatgccggacaatagccatgtataggttgtgtggataatgaaaatgaaataattaggataagcgtttgaatataaaaataaatggtaagatgttcagatgttaagataacaccaatgaagtggtgggaagcagacaaagggtataacggaatgtattcctaatgtacctggttggtgagtctgctattgtctggtagttctaatatagcatccgtgaccgggagaagcaagtataaaaacatttttacaaaccctgcaaaaaaatattttctcaaacccgcagaaaatctgcaccatcaaaggattctgtgctacaatcagactgtaaaaaagaggaagagggcatgacggtgattgaattcttaaaagaggaaaagataaacagcagcttaattgaaggaattatggaattcagggcttcccatcctgtcagggaggaggaccggggcaggatacccgtgcccaggtacctgtattatggaagggacgtatgggagcaggccgttgcagctcttttgtgcggacagaatctgcttctcacagggccgaaggcaacgggaaagaacatactggcccagaatctggcggcagcgtttggcaggccggtttgggacatctcccttcacgttaacatggatgcgtccggcctgataggaacagatacatttgaaaacggagccgttgtgttccgtccgggaccggtgtaccgctgcggaatcagcgggggttttggcgtactggatgaaatcaacatggccagaaatgaggcactggccgtgctccatggaattctggatttcaggcggaccatagatgtgccgggctacgatgtggtgcgtatggacgagggaacccggttcatcgccaccatgaactacgggtatgcaggcaccagggagttaaatgaggccctgacctccagattttcctgtctgcagatgccggctataaccggggaaaacctggaaaagctcatagaccgggagtatcccggccttaagaggacatatgccaggcagtttgtccagctgttcctggatatagagagaaaatgccaaagcgcccagctctccacccgccccctggacctcaggggactgttggatgctgtccgcctcatggagcgggggctggatgcgggagccgccctggatatgggacttaccaacaagtcctttgacccctatgaacagaccctggtccgggatttaatcagggcaaggattcctaaaaaactggaaagggagaagctgtttgcagactgatattaaaatgcaggaatatgacggggaggagcggcgggccctcaacatgatatggactgcggcaaaggaccactccttccggccggaattcatggcttttgaccggtacggaagggcagacctttatctcaacagtattatcggttatgtccacagatggtatgacggcgggaaagtgtcggaaatgttcggggcatttcagggcacggcgctccaggatatctatgataccatattctggtttggcctggagtgcggcgcctatgagaaggagcgggaagggcggcctgggttggaggagctgcgcagggaatactgggcccaggtattggaggaatccaaatggtcggctcaggaaaagctggtccagtcccttcagacgggctggggcaggatggttctgggagagaagcccggggtgacgccctgggagcgggggattttgtccggcctgtcctttgacgggtctgccgacaccgatgaaatcatggagcgcgtttccggcatactgtgggaatatttccggtttgactgccgttcagaacaaaagagaaaagaaaacagaaaacggattaaaagcataattaggcccttccgctttgtccggcctgcccacggcgtgattgtcaggaatacactgaatgagcatggacaggattcccctgaatccggtgatgaccaatgtgaaaaatccggaaaggcccataaaaagccttctgatgcagccaagggcttttgcttctggctggaggcatcctcgaaacggagggaggaggcggtccgctcctatatagatgcctgctatggtatttccatgtatgcagagcagcagaatcaggctatctgccatatgctctgcacgggatgccacagcacatgcagcctccattttacaaggggagagaaattcctgcaggtcccggaccgcggggaatcggccagacagctgtgggaggcgcggcagcagagaaaaaagaacagggaacagtttgaagccaacaggccggagtatgagaacagcatacggtgcctgatggaacggattcagaatacccttctggtggatttgcagcctgtacccgaaaaaagccggcagggaaaaatgatgggggaggcagtctggcgggctgtgtatctggaagatgaccgtgtgtttttgaaaaattcagaggaagaacggcagaatgtttccgtggatttgatgctggacgcgtctgcgtcacggatggggcatgaagccgttatagcggcgcagggatatgtgattgccgagagccttacccgctgcgggataccggtccaggtgtattccttttccaccattcagaattacacggtgatgcgcctgtttcgcggatatgaggagaaggagaaaaacagaggaattcttgactatgtggcagccggatggaaccgggatggtctggccctcagggcagcgggccatctggcgggacagtcctcctgcgagaaacgcctgctcattgtgctgacagatgccagccccaatgacgaacaaaggatggctcctgtttcgggtgctgtgcgggggaaggagtattcgggggatgcaggcattgaggacgcggccatggaggtgcggcagcttaaaaagcagggaatcagggtcatggctgtattctacggcctggacagcgacctggaaggcgccaggaagatttacggaagcggttttgtcaggatcaaggagatggggcagcttgcggatacggttggaaatttgctgaccagccagctgcggtccggccggtagcagcagaatcataaggaggggatatcccggagccggacaggctttcaggatatccctgtttttctccattatggtatgacaagaacctgccccacgtaaatcaggttggggtttgctattgcgttggtaaataccagatctgatacgctggtgccaaaacggtctgcaatggcccagagggtgtcgccgcttttcacccggtatatgatggcgccgggaatatccggaatctccagaatctgtcccctgtaaattatattcggattggagatatggtttaatgcagccagccggtccacggtggtgtcgaatcgtttggagatgctccatagggtatcgccgccctgcaccttataggtgagaaggactcctatatcgccgggatttggttcaggctggggtgtccgggagataataaacatggaatccttaaagaaatccatgtccacatcgccgtttactcccggtacccgtcccctgtccgagtactggaaaccgtcccaggaatcccatgggcccgtgctctccggctggtttacatcgtagtcagccacccacagggggtaggaggaaaagtcactgctccacaggtaggcggcgttgtaggagtctgtatatagggctggatcatatcccaggaggctgcccagggtttccatgaaagacagtccgatggcattgatttcctgggtgctcagacctgggaacgattcaaaatccatggccgggcagcagtcaatctgcttgtcccgtatcagggaatagaaaaattctgcctgctgcctggcctggaaggtgtcggcggcagtcacatagtgatagtatccgatgttcaggcctgcatccagggctttctcatagttggactggaaatagggatccacatattccaatcccacaccggcccgtagatagaccacctggataccggcagcccggactgcctggaaatcaatattgccctgccagctgctgacatccatgccctggtacaggcgggaagccgcaaatgcaggagagcacatgaagcacacggcaaagataagggacaggatgatacctgctgcgccccgtaaatgtttcattgtcaatcctccttaaaggtagagtgttaatcggtacaatatactatatgaagaaatgaaaacagcggtgacaggccagggggaatgtgctagaatgaaggcagcaatacgtggaaaggaagataataatgaaagaaaataaatatgacaatgatatattttttgaaaagtacagccagatggagcgttctaaaaaaggactgtccggagcaggagagtgggagacgcttaaggcgctgctgcctgattttcggggacagcgccttctggatctgggctgcggttatggctggcactgtatctatgccatggaacacggagcggtttctgccgtgggtgtggatatttccggtaagatgctggaggtggccagggaaaagaccgaggattccagggtacggtatgtggagtgtgccatggaggacattgatttcccggatgaatcctttgacgtggtgctcagctccctggcatttcactatgtggaaagcttcagccaggtggtggataaagtgagggattcgctggctcccggtggatatttcgtgttttccgtggagcatcccgtatttactgcctacggaagccaggattggtactacgatgaaaatggaaacatcctccattttcctgtggataattattactatgaggggaagcgcaaggctgtgttcctgggagaagaagtggttaagtaccacagaaccctgaccacttacctcaatacccttctgacccatggctttgaactcagccaggtggtggagccgcagccgccggagagtatgcttcatattcccggtatgctggatgaaatgcgaagacccatgatgctgattgtgtcggccaggaaacgttcctgacagggacgtcagaggcctccggtttaaaactgagataaggagtatatcaatgaaatcacttgtaatagcagaaaagccttctgttgcccgggacattgcccgggttcttaagtgcgggaaaaatataaacggcgccattgaaggggatcgttacgtggtaacctgggggctgggccatctggtgaccctggctgaccccgaggattacgataagaagtataaggaatggaagatggaggaccttcccatgatgcctgaggtatttaaacttgaggtcatcaagcagacctcaaagcagtaccaggctgtgaaaacccagatttaccggggggatgtgggggacattatcattgccacggatgcaggaagggaaggagagctggtggcccggctgattctgaaaaagacagggtgcaataaacctatccggcgtctgtggatatcatccgtgactgataaggctatcagggagggatttgcgaacctgaaggacggaagggaatacaataacctgtatgacgcagccatgtgcagggcagaggcggactggctggtgggcatcaacgccaccagggccctgacctgcaaatacaatgcccagctttcctgcggccgtgtccagaccccgactctggccatgatagcaaaacgggaggcgcagatacgcgcgtttgtgccccagccatactttgggcttcaggccagaaaggacgggctggtccttacatggcaggatgcagggacaggcagccaccgttcctttgaccgcggccggatggagggactggctcaggagcttaagggggagacggctgttgtggctgaggtaaagcggacgcctaaaaagacgcagccgccccttctctatgacctgacggagctgcagcgggatgccaataagcggtttaattattctgccaaggatacgctgaacattatgcagcgcctatatgagaaccataaagtcctgacctatcccagaaccgattccaggtatctgagcgcggatattgtccccacccttaaggagcgtctgaaggcgtgttccgtcggcccctataagatgctggccggaaggctggtgaaccagcccctgccggcgaaaccattttttgtggacaacagcaaagtttccgaccatcatgccatcattcccacggaacaatatgtgcagatggaccatatgaccattgatgaacgccggatttatgatttggtggtgcgcaggttcctggctgttttgtatccaccctttgaatatgacgagaccagcctggaagcaaatatccggggccagcggttcattgcaaagggaaggatagtaaagggccagggctggaaggctgcttatgacacggctgtggatgacggggaagaggaggatgagccggaggtaaaggaccagcagctgccggatctgaaaaagggggatgtgttacatggcctgtcccttaagatgacagagggtaagacaaaaccgcctgccccgtttaatgaagcaaccctgctctccgccatggaaaatcctgtggcgtacatggaaacaaaggataaggccatggcaaagaccctgggggagaccggcggtctgggaaccgttgccaccagggcggatataatagaaaaactgttttccagctttctgcttgaaaagcggggcaaggatatctgcctcacgtccaaggccaggcagctcctggagctggtgcctgaggacctgaagaagccggagctgacagcggactgggagatgaagctgtcgggcattgcaaagggaagcctgaaaagaggcgcgttcatgaaggacatcaggggatattcccaggaactgatccgccagattaagacaggtgagggttcgttccgccatgataacctgaccaacacaaagtgcccggtgtgcggaaagcggatgctggctgtaaagggaaagaatacggagatgctggtgtgccaggaccgggaatgcggccaccgggaggtcatttcacgcacctccaatgccagatgccctgtctgccataaaaagatggagcttaagggcaagggggatgcccagatatttgtgtgcaggtgcggtcataaggagaagctgaaggcctttgaggagcgcaggaaaaaggaaggcgccggagtgaccaaaaaggacgtggcccgatacctgaaccagcagaaaaaggaagcagaggagcctgtcaacaatgcatttgccaaggcgctggcggggctcaatctgaaggataagggctgatggaaaagcgacggtaaaatgattgtaaaataaaaaaattcttgacaagaaagttagctgatgctaatctatatatgcagttagggatatctaattcctgtggggaacaggaaacagaggcgcctggctgcatattttagaaaatgtgggttagctttaacttacttaagaaatagagctgaagcaacgtctaaagggcagaagcaatgcctgacagcaaagtaaaggagctgagtgatatgccgtggaaacaaagagaggagtccggcacgtggcagaaggagcgggtcatccaggaactgaggagccaggggaaacgtatgacaaaacagcgtatgatccttctggatgtcatactgagcggaaagtggaactgctgtaaagaaatatattacgaggcggctaagcgcgatgcggccattggtatggcaaccgtttaccgcatggtatctactctggaagaaatcggcgtattcagcagatgctaccgctacagcctgccggaccgtccctgcgtggaggaacaggccggggattggatggattagatacagaacaatacatatggcagaggagacatgcacggtcaggcgcatgattcctctgtctttttttgtccgacataaatgaagaaatatataaaaagacgggaatggcttgacattcaaccttattcaacccctacaataaacctgtaaggaggtgtgtatatgacaatcaaagaggtagagaccctgactggaatcacaaaagccaatatcaggttttacgagaaggaaggtcttttaactccgggccggagttccaataattacagggagtacagtgaggatgatgtggaacatctgagaaagatacgaattttccgcatcatgggattttcagtggtccagattcgccagctggcagaccagcctcagagggcagcggttctcatggaagcgcgggcaggacagatacaaaaggaagttaaggagctggagcgcgtcagacaagtgtgtctggaggtcagggattcagggtggaggtttgacacactggacccgcagctgctggaaatgaaactggaatgggaaaagaaaggaaaggatatcatgaaaaaggacaggattgacaggctgtgcaaggcaagggatatggcatacttattttgttttctgtgcattgtatccatgattatgtttccaattaaccaggttttgggaataagactgccggagaaattcattcagatctggcgccttgtcataaccatttcaccgtttccggctctgctcctgggagctgccgcagcgggaaaggcgcgctggcaggtgcctgatttgaaccggattctgccggacagcggaaagccgtttatgaaaaaggagagggacagggggaagttgtatgaaagagtctgctttctgaaccagatcgggctcacctctctggtactaattcccttgaataaggcgctgggtattcagctgcccttgtgggtgacatgtggatggatggctgtgatagcaggtctggccatagctgttatggtgcttaaaaacagagggtagggtgaaacaggacggcttttcagatggctttgctccataaaagcatggttgcgtgaaaccgggaaagggtggtatactgtctgttagaaccatttatggaaactgctggaaagggagtactgggagctatggaacgagaagtcagtctggaggatatatctgacgggaaattatatggtatcaatgatatggtgagggctgacagcggcggatgtgaaggctgttctgcctgctgccgcggtatggggtcatccatcatactggaccctctggatatgttccgcctttcggggaaccttgggatgacaccggaacagcttctgtctggcccacttgaggtgaatatggtggacggcattatcctgcccaatatccggatgacaggccgggatgaggcctgttccttcctgaacggagagggcaggtgcggtatccattcttacaggcctgggttctgccgtctcttcccgctgggaagactgtatgagaaccggtccttcagctacttccttcaggtccatgagtgtcctaaggataacagaagcaaggtaaaggtccgcaagtggattgataccccggatgtaaagctgtatgagaaatttgtaaatgactggcattattttctcaaggatctggaacatggactggaagaaaatggaagcctggacatcaggagaacggtggttatgtatgtgctgaatcagttttacataactccttataacagcggggaagagttctatccgcagttttacaggaggattacagaggcttctgagtttgcggcacgttccggaattaaaaccagcctttaaaagcagttttcggatatcaaccaatggacaggaggaagattcatatggaattagatgcagtattgagggaaagaagaagtatgagaaagtaccagccggacaggaaagtgagccgtgaacaggtggaggagatccttaaggcagccacccttgcgccgtcctggaagaattcccagacagccagatactatgtggttatgtcagatgacatgctcaaaaaggtaaaggaaacctgccttccggcctttaaccagacaaacagcaaggatgcgcctgtactgattgtggccgcctttgttaagaaccgctcaggatatgaaaatgacggaaccccttccaatgagctgggaaacggatggggctgctacgatttggggatgcataaccagaaccttctgctgaaggcaaaggatttgggcctggacaccctggtcatgggaatcagggatgctggtaagctgagggaactgctctccattggggaggaccaggatgtggcggcggtcattgcccttggatatggcgcgaccgaccctcagatgccaaagcgctgtacggtccgggagattgccagattctattaatcagcgcggaggtaaggcatggacaggattacgagagtatccatagtaggaatgggtgcgttgggtgtattgtacggggatttctttgcaaggaccctggggctggagcaggtgacattcctggcagacagggaccgggtggaacgttaccgggataccacggtatactgtaacggaagaggatggaaattcgcggtctgtccgggagatgaagcggaccccggaggaccggcccagcttcttatatttgccgtgaaagccactgcgcttgaggcgtctgtccccatggtcaggaatcaggtgggaaaggataccgtgattctttccgtactcaatggaattaccagtgaagccgtcataggaaacatactgggaatggagcacgtgctgtactgcgtggcccagggaatggatgcagtgaagatgggaaatgagctgacctattcccatatgggacagatatgtatagggattccccaacatgaaccgcagaaagaggcaatgctggaggcggtcacagagctgtttgagcggacaggacttccctataccagggagccggatatcctgcgcaggctctggtgcaaatggatgctgaatgtgggggtgaaccaggctgtcatggtggaggaagggacttatggaaccgtacaaaggccgggaccggccagacagatgatgaaggcagccatggctgaagtagtggagctggccggaagagagggaatccgggtgaccatggaggatttggacgcctatgttgacctgattgacagtctgaaccctgatggtatgccctctatgcggcaggatggattggcccgcaggccctcggaagtggaattttttgcgggcaccgtgattcgccgggcagaggcggccggcctggatgtgccggtgaacagggagctgtaccggaggattaaggggatggagagcggatacccagtgtgatttgcgctgctccatcagaggaaatgtgtgcatggaaacaagaaaagccggaaagcgaaattcgttttccggccattttttcacccctagggttcaaaataccccttcaccacctcagcgatcccctcagccaatgccccatggttctttgcgtccatgtggagctggtcaatgctgctgggaccggccagggatgcggcatccaggaaaagacagccctcagcttttgccagctcctgatagaggggcgcaagggccattgatttaccgggtgcggtttcatcaaaactgacatagggacagtgttccatgtcatttcctatatggataggggatatcaccagaatcttaggcttcttatagccttccccgtaatcaaatccctgtaccgtgtgacacaggttttccattccctttgttataaccctgggcgaggcatgaaagtgggccttgcagtcattggtgcccaggaacagaatgaccaggtccagcggtttgtggctctggagtgccatgggaagggcctggatgccgcatcgtccgggctccagcgggtcatcccataccgtggtgcgtccgcccatgccttcctcaatcacataatactcaggccccagcagaacctgaagccgtccgggccagcgggtattccaggaatggcgtcctcctttgggattggtcccgaatgtgttggagtcgccgaagcagagaatatttatcatagacagaacctccttattgcatggttgagctgttccaatcagtaaccacacttttctcctatgatatcacaagtaatggaaaaatggattactttatgataaaataaacgaaactgtaacaggaggaaacatctatatggataagatttcaaagggatttgtgggcaggacagtacgcgctgttctgttcattattcttatcatcgtattctgcactgccatatccagcgcaggcatatatctggcatccagatatgggctgacccagtccagggagcaggtgccgctgacagctctttacctgggaaatgaaggaaaggtggaacttccgggaaggggaaagatggcggagggaaacggatggagactgagaaattccagggacagctatacgctgacattggataatgcggttatagaaaacacagtcatggaaaatacagtcatggaaaacgcggagtcctcccgcccggcaattgatataacaggggatttaaccatcgagttaaaggagggcagcggcagctggatccggtcagaaggtgcaggtatacgcatacattcaggtaccctggtcatccggggaaagggaagcctggacattgaagccaaaacagcaggcatattggggaatcggacggaaaacggccaggcagccctgcgcctggagggcggacagctggatataaagggaacgtatgcgggaatatcgtgtccggaggtggatattgccggtggaaccggtacggtttcagctttgggccaaggtggaatcggcatttattcatgcagaatcaaagtggaagaatcagaaggggaaatgacggcagagggcagcggtgcagcggtgctggcaggcggcagcggggagatgaagccatccataaagtcagatggaaaagtgacggcaggacctggcgatgtccgggtcgtggagtttgacgctgcccggccagaacacatggcaggccatgaggaagaaatcgggggatggatggggggaactcattctgccctgcttacatattcgacggaggatatggttacttataatgaagatacatcctgttttgacggttcagccaggaccctcaggtttgccgcagaataaggaaatagaacagatggaggaatgaaaatgaatcttaccgtattatgctacaaaaaatgctctacctgccagaaggctttaaagtggctggatgccaatgggatttcctatgtggaaaggcctgtcagggaggagaatcccaccctggaggaattaaaggaatggtacgggatgagcgggctttctctaaagcgtttctttaataccagcggaaatatctacaaggaaatgtctctgaaagataaactgccgtccatgagtgaggacgagcagctggcgcttctggccacggacgggatgctggtgaaaagaccgctggtggtgggggatggctttgtgctcactggatttaaggaggcggagtggaaggaaaagctgctgtagattttaacacacacatataatcaacctgacatgaaatatgatatgccggaagatgcaccttataaacagtgcgttcttccggcatttttaagtgatattgttttttcataataattgtggaacatggagtacgaaacagccattctctatgtctggtctgccgccaccaaatcatccagggttccaaaatgatatcccatttcctcccacttggtcagaagttcatccagaatctgcccatttgttttggaggtgctgtgaagcaggacaatggcgccgggatgaatgcgggtcagcagctttttaaaggcttcctctttggttggctgcttatcttcataccagtccacataggccagactccagaaaaaagtcttatagcccatgtcattggccattttcaggttgctttcactgtatttgccctgggggggacggtaatactttttcattggctgtcccatggtctgctggtacagggtttccaggtcattcagttccttttcaaaggcttccttggtggaaattttcgacatatccggatggtggaaggtatggtttcccacattgtggccctcggcaaccattcgctttaccaggtccggactggtctgtaaataatttccaaccaggaaaaaggtggcgtgtacattgtgttttttcaaggcgtccaggatagcggctgtgtttccgttttcataacccgcgtcaaaggtcaggtagatgaccttatcctgggtattctgggcatagtaggcattgaactgcttcagataatctgcggtggcatttcccacaggcatctggccctcgcccgggaaactaagtccccagttgccgtcggctgaggtggtcactgcttcgggaggacggttgtattccactacctgggcagccagccgtccggcacaaaaggccagggcgaacagcagggtggtctgtaacagcttcttcatgggaagtcttctgagtctgtttttcataaaggataggtcctgtttcagaagtaattactttaaatatatagaaacagaggcagtattattcccggaacccgcaaaagaagggggattgcttatggatttatacaggacatggcggggaagcccgccgtactttttggtggtagtcacaatccggtatcccagtttgagaaaattgcccaggctgtaccggttgtcaggatggaccgtccccatcaggtggcaataggaggtagtcatcagatactgctctgcgctggccatgagctgatattgaagtcctctccccctgaagccgggccggactgccagggagtccatgtgggccaccctgtcaagggcctcgggatccaggttcatgtagtgccccaggctgtcaggggtgttacccggaaaatgaatgatgaaaaaggcagccagacaatcatgctccactgccttaaagacgattcccgcatcaggatttacgatgtgggaccgtatatagtcctctgagtcggtacagtaccagccggggtccggcgccagggagcgggcttcggtcatgatgcggtatatttttgctgtgtcggcggcgcatgcagtttggatgttcatagcggtcaactccttatgggtatcatacggatcggcctggggacggacctggtgagggaagtccttttggccatagggaatcatatggttatgggggcaattaaattcatcctggtccccacacagagagaaacgctgacagcaatgggggtgccttcgtactggaaaccatttaccagcatcagcatactgtcgtgttcgctcagctccagcagttcatattcttcacggctgggctgatggacccgcatatactgggtctgtttcagtccctccggcagggagcgcagatagaatagtcctgggaaggacggcatggacgagctggtctgggccgtataagtgattcccacgggaatatcggacagatattcgataaaacggttcatgttgagatgggaactgtggtcggcattcagcatgttattgcatatattgcggatggcctccggcatatactcggttgattttacggaaaatgtgtccggatgcaaataagaatccgcatagggaaaacaataggcggtcagggaacggtctgttctgggcggattcacataatagccgttttcagaccggatgacgccctggtctaacagacgtttgtatccctggcgcacgctgacacgggttatatctaactgggccgccagttcccgttccgtgggcaggcggtctcctggctgcagtccatgttcgtggatgtatttttctatatattctgcaatgtcgtaacttagaagattgaaaacttttggcatactgttaccctttctggtgataggtgtcacgatggaataaaggttattctggtatcttaaaacctatcagtggtctatatggattgcgcataaacattgagtttgctgtcctggataacgccgtcggagtagaacttacagaattccggaagcaccagggcgttggtgtactcaatgattccgttttcctcgctggcggaggtgatggcaatggataccaccgggctcccgttttccgcgttcaggtatttggcttcggagttgcgcacacgggtggtggagaaaacctgctgtatgccggcaatacgaagagaattcatggcaaatgcatcatacagagagtagatctggaaatcaatatcctctatatcaggaatcagttcatagggaacaaaggtattttcaatggatacaggcagtccgttgccaagacgcagacgcatgatacggtacaacaccgtatcttcgcccacctgcagcagatgggagagcttgtaaccggctggtgtgggaccggtatataaaatcctggaggaaggaacatatccatgatttttaagcagctcgctcatgccccggaaatgggtgtatgcgttatccctggcatggcgcatcacaaacgttcccttgccctggaccttttttaacaatccttcctccaccagggtctggatggcggcccttacggttgaacggttaagtccaaagctctcggccagctcccgctcagcgggcagggcggtgccatagggataggtcccctcctgtatattgcgtttcagcgtctgggtaaatatctctgattttgtcagtctctgtgtctgcgtgctctgcctctgttttccctgtatctgtttatcctgtatctgttctccctgtatctgtttcctctgcatccgtttcctccatgccgggtatccatttattctttatcgggtctgaaaccgtcttttgctatggcagaaaccgtccgcattccggacaggcacgatttaattcccttgcctcattatatcatattttggaaaaaaagaaacaggaaaatgtaatgttgtataaaataaaatataattggtacgaaaatggtattgacaaaggtggatgatgttggtatattaaaaacacaagatggtttgtacaaacgctatccggttaaatacataaaattcaatttgtctaatcaagaggaggattatgatgtacggttttcagaatgaggatttcttaaaaactttaaatggagcagtggcccagatcggtgagattaataggattgcggataaggtgagtgatttgggatataaaaacatctatttggttggaacgggaggcacctatgctatcatcagcccgctggcatacatgctaaagacaaactccgctctggtatggtatcatgaaattgccgccgagctgctggccgcaaagcccagatcactgaccagagattctctctttatcacggcctccttatcaggaaccaccaaggaaaccattgcggcggcagagtatgccagaagcatgggagccacagtgatttcttttgtgggggacaggacagctcctctggctgctgtctcggattatgtggttgagaatgctgcctgcaatgacaatctggtggaggagctgcatatacagttttttgccctgggagccagactgatgctgaaaaacggagagtttcctcagtacgaacggtttgtggaaacacttcggaagatgccggaggtactgttaaaggtgcgggagcagaacgacgaacgagcacttgcttttgcagaaaagcataaggatacaggcttccatatgtgtgtgggagccggtaatacctggggggagacatattgctttgccatgtgcgtgttggaggaaatgctctggattcctaccaaatccattcatgcggcagaatttttccacggcactgtggagatgacggataagaacatgagctttatgctttttaaaggagaggacgagacgcgcccactggttgacagggtggagaactttgtcaggaagtattcggatgtggtgcaggtatgggataccagggattatcctctggaggggattgacgccgatatgaggaagtatgtctcccccatggtcatgtccacccagttagagcgtgtcagcgctcattttgaacatgtgaaggaccacagcctggatatacgcagatactacaggacggtggagtattaaggattagaaaaggagattgccccatgagaaagatattgattgcgacccacggtgaatttgccggaggactgaagcagaccatggattttgtcctgggaggaaatgaaaaggtaggtgtcctgagcgcgtataccacaccggattttgatatggacagggaagcggccgctgtggtggatgagctggaggacggggacgagctgattgtcatgacagatgtgctgggcggcagcgtggccaatgctttctcagggcatatctcccatccgggggtttacgtactggccggcgtcaatgcgcccatgctgctggccatggtgccgatgctggagagcgccatggatacccaggagctgattacacagggaatacaggcagccagggaagggtgtgtgtttatcaacggtctgatgaagcaggcttttgaagagagtgaggaggatttcgtatgattaagattacaagagtggatgagagactggtacatggacaggtggcctttgcctggaccaattcattgggagctgactgcatactggtcgtaaatgatgaggctgcggcagataagatacgggccactacccttaagctggccgcgccggcaggaatcaaattttccataaagtccgtggcggatgccattgtccttttaaacgggacaaagacggacaagtacaaggtgtttgttatagtgggcaatacggatgacgcgctgaaactggtagagcatgtgaagggtgtggaccacatcaatcttggcaatatgaaaaagacagagggccgcaggatcatcaccaattccctggctgttgacgaccatgatgtccggaatatccgcgccatggctcaggccggtgcagtggttgagtgccgggcagtgcctacagataaagagacggatgcaatgacattgatataataagacgaatcagtcagaggatagagaagggagaaggattatgcttcaggcaatactggtgtcaattgtggcctttctggctgccattgacgaatatacatttggggcgtccatgatggggaggccgttatttaccgcgcccattgtggggctgattctgggggatttccaggccggaatcatgataggcgccacgctggaactgatgtttatgggatctattatggtagggagcgctacaccgccggaggtgtatgcctccagcgtgctgggaacagccattgccatccaaagcggggagggagtggggacagccgttgcattggctctgcctctgtccatattcctgcagatgtggagaaacggctgttacgccataggcgccagctggggaggcaaacagatcgagaaggccctggcccagagaaatttaagaagggcaaacatgtggcatctcatcacactgccgctgatggtgggcgttccatccatgctcctggtgttctttgccatgtattttggcgcaggcagtatcaatgcggttatcaagctgatcccccaggtcgtgctggacggatttgacgtggcggccggcgtgctgtcctgtgtgggacttgcgcttctgattaaaatgatgggcaacaaaaaactgatgccctacctgttcctgggattcatagcagtcatgtatatcaatatggatgtgattggagtcgcagtggccggactgtgcatggcgcttattgccgtgggaaatatgaaatttgaagaagaggaggatttttagatgcaggagacaaaggaaacttcccttataacaaagaaggatttgcgcagtgtgttctggagaagctttaccatgcagtcctcctggtcctttgataaaatgatggcctatggatttatgtattccattgaaaagcctctgagaaagatttacccaaaagacgatgattattttgaagcgctgcaccggcatacagagacatttaatatcacgccccatgtctctccctttgtcattgacctttctgttgcaatggaacaggaatgcgccaaagcagacaattttaataaggaatccatcaataacctgaaggtggggcttatgggcccgttatccggtattggcgattccttcttctggggtacattccgcgtcatcacggcgggaatcggtattgcctttgcccagcagggcagcatactgggagcccttctgtatttcttcctgtacacggcaatccattttcttaccaagtatattaccggaaatgccggttacaagatgggaaccaggttcctggagaactctgcggagaaccatcttatcgaaaaaatgtcctacggggcatccatactgggacttacggtcataggagccatgattggaaccatggtgacgcttaagacatccctgacctttcaattttcaggaacagagaccactttgcagtccatctttgaccagattttcccgggactgcttcctctgggagccacatttctttgtgtatggctgtttaaccggaatgtaaaaaccattgccatcattctgggcatttttgtaatctgcattgcggggtgttggattggaattttctaggagggatggaaaatgacaaagctggtggcgttcgatttggacgggacactgaacatgactcatacatacgcagtggcagcctatcaggaagcccttaaggagctgggggccgggcctgttgcagagagcgtgatacgctccaggttcggtgctccctttagggatgacagcctgttctttctgggtgatgacagcgaggaagcctttaggcgcttttaccgggcggtggagaggcactgggcacctcttatgcgtgagaaggcgcagacctatcccggggtcccggaaatgcttggggagctaaaggaacaggggtacgtcctggcggtctgttccaatgcaaaggaagaggaactggaggatgtgctgggtgtactgtccataagggagtattttgactatatacagggcctgacctccagacaggacaaggcagacagcctgggtgtgctgatagagcgggccggtgcggactggtgctgtatggtgggggatcgtttctatgacagggaggcggcaaaggccaatgagacagcgtttatcggatgcaggtacggatatggaggtgcggatgagtttggggacggggatttgctggcagaggacagcgtggagatacccgggctgctgaaacggctggttttctccacaccctggctgaaaccatggcagaggccatagggaggccatggggcagggattaccggaaactgcggcggattccgggattccataaatttgttaaaaaaggagaggacactgcctgtgataggatgatggaatatgtgatgcggccggacagagatgtccggctgttttttttgacagaacataagccagagaatagactaaagaatagaccggagaaagggccagagaatggccggagaaagagccggagaatggccggagaaagggccaaagaataggccaaagaaaccaccatcaggctcataaatcaccattgttttatcatttcggatttgttataatgaattacatctatatgtttaatcggtttagtctgctttaggcagcaggtccgctgcggggcgtattcgccatttttccatggttttgaagcacagctgaagataagtctggcgctaaacgccgggaacagggacgattgggttcttttatgccggagcaatacagaggagtttgatgatgacacaatatgaaatattaaaacattattttggttatgacacattcagggatgggcaggatgtgctgatccagagcattctggaaggaagggacgtgctgggagtcatgcccaccggggccgggaaatccctgtgttatcaaatcccagcccttatgatggacggaatcaccctggtcatttccccgcttatttccctgatgaaggaccaggtaagcaacttaaaccaggtgggtattttggctgcctacattaacagttccctgacagcggcccagtattataaggtattggacctggccagagccggcagatatccgattatctatgttgcgccggagcgcctgatgtctgaggactttctgcggtttgcgctgagcagccaggtgaagatatccatggtagctgtggacgaggcccattgtgtatcacagtggggccaggatttcaggcccagttatctgaaaatagtggattttatcaaccagcttccggagcggcccgttgtaagtgcatttacagccaccgccacagcggaagtgcgggatgatatcatcgacatacttatgctcagaaatccccaggtcatgaccactggttttaaccggccgaatctctacttcggcgtacagtctcccaaggataaatatgccaccatggtaaattacctggaacgccataagggggaaagcggtatcatctattgcctgaccaggaaagtggtggaggaggtttgcggccagctgatccgggaaggtttctccgtcacccggtatcatgctggcttaagcgacagcgagcgcaggcataaccaggaggattttatatatgacagggcccagattatggttgccaccaatgccttcggcatggggattgacaagtccaatgtcaggtttgtggtgcattataacatgccgaagaatatggaatcctattaccaggaggccggcagggcaggaagggatggtgaaccctcagagtgcatccttttgtacggcggccaggatgtggtgaccaaccagttctttattgaccataaccaggacaacgaggcattggaccccataacccgggaaatcgtcatggagcgggacagggaacgcctgcgcaagatgacattttactgctttacaaatgaatgtctgagagattacatactgagatattttggggagtacggaagcaattattgcggcaattgctccaactgcctgagccagtttgagacagtggacgtgacggatatttcccggatactcattggatgtgtggagagcagccggcagaggtacggaaccaatgtgatgattgatacggtccacggtgccaatacagcgaagatacgcaattacaggatggatgagaacccgcattatggggaactggcaaaggtaccggcctacaagctgcggcaggtgatgaaccatctgatgctgaacggatatctggcagtgacaaacgatgaatatgccattgtaaaactgacaggaaagtcaaagggaatcctggaagagggagagccggtgaccatgaagatggccagggaagcggagcatcctgccaaagcgtccggcgcaagtgccggaaagggaagaaaaggcaggaaggggctggcagcaggtttgtccggaccgggcggagcagagtttacggaagcagacgaaacgctgtttgagaagctgcgcgctgtcaggacggagattgcaaaggaagaaaaggtgccgccttatatggttttttcagataagacgctgacgcatatgtgcatcgtgaagccggttacgaaaggggagatgctgaatgtttcaggggtgggagagtttaagtatgagaaatacggggagcgttttctggcctgcgtgcaggcggaaatgaatgacagtcctgctgagatgtcttttgagggtgatgatttgtattttaccagcgacagcgatgagttcgacgactggtccctggagacagccctgaccgcctgggaatacggaggccgggaaaatgacaggcaggaaaatggcagcctgggaaatgacagccgggagaatgaaagaaccagggaagcaccggcagagctaaacacggacagaaagaaaaaaacaggtaaaggcaaaacggattttgtcatgaccggggaactggccgccagagtccgatactcagaacagtccagtctcagtgattttgtatctcagattaacagcctgcgggatgaggatacaatgaagcggctgaccataaaatccgttgaacagaaattgatggaggatgggaattttgaggaatattacgtaaatggaataccccgcaaacgactgacggacaagggccgggaatttggaattgaggcagagaaacggttgagtgagaaggggaatgaatatgaggtgttcttttatggtgagagagcgcagcgggggattgtagagtggttatgggaaaaaatatgattgttatgtgatggggagaaggagaaaaacagaagcgtccggtgatactgttcaaacaaagccgctgccgcccattaaagggacagcggctttgccattgataacttcacagatttggggaatgttaaatagtaaaaataagaaattgacccaattcccatattgtccatgaatttatcaggaggaaggcgcatccatgaaatttgacgcagtttactatgaaccggctatctttgactaccctctgggccggcagctcagggaggaatacggggacctgccgtggattcccattgagagccataattccattcgggaaatgcaggaaaaacccaatgaccagttcggacacatgaaacgcaatctgattgcgggcatacgaaagacccacaaatacgtggaaaaccacaaggtatccgattatctggtcccatacacctcatccggctgtacggccatgtgcctgtactgctatctggtttgcaactataataaatgcgcttatctcagactgtttgtgaaccgggagcagatgctggaccgcatcatcaaaaagggaaagaacagcggcaccccccttacctttgagattggaagcaacagcgatttggtgctggagaacacaattacgggaaatcttctttatacaattccgcgttttgcagaggagggggagggaaaacttacatttcccaccaaatttcatatggtggaacctctgctggacctggaccacagaggcaaggtgattttccgcatgagcgtcaatcctcagcccattatccagaagatagagctgggcacatccggcttaagacagagaatcgaggctgtaaatcagatgtgtgaggcgggatatccctgcggactcctgatagctcccgtcatattagtggagggctggaaggaaatgtataccggcctcttggaagaactgagggacggactttcagataaaatgaaaagccaaatgtttctggagattattttgatgacctattcctatgtccaccgggccattaacagcgaagcatttcccaatgcgccggacctgtatgacagggagcagatgacgggcaggggacgggggaggtactgctaccgggccgaatccagggaagaggcacagctgtatctgcggcaggagataggacgtgtactgggaaatgtgcccatactttatataagctgacatggccttgccgcagtttgaatgtgccgtgccgttccgatatccattgtgatgggaaccggcatgcgcgttttgtattatgggtttgtagtatcggtttgtattatcgtaagaatttggcaattgtatccatatagtcagtctgatataatcagaaagaggctgctgctgccgtatttccatggcagcagagccccggaatcacttaaacgatgaagggaaattgccatgacaggaaaggaaacagatattgcagaggccaggcagctgattgtggacctctatggatgccggacgtcctgtattgatgatgtggattccataaaaaatgtgattcacatggtctgccaatgcataggcgcaggaattgtggaggaatgctaccataaattctcgcccatgggcatcagcgcggtggcagtcataaccacctcccacatttcaatccacacctggcctgagtatgggtatgcggcagtggatatattttcctgccaggaggatataccgggagagatatgccgccttctcacagagtccttaaaggcagagcaggcagaaacaaggctgattaagagggcgttaaacagggcaaaggaggacgtccatgggtaagacattacagtttaataaggaccagaacctgtccatagaaggggcggaataccgggtcacagggggaattgagttccacaaccgttcagacggttcccgctggtgggaatactgcctgttggaaacccggaccaggggtataaaatggctcagcattgacaatatttatgaagaatacgccatttatacccagtgtccctatggcagtgagtttgatgagatgaatatattccgggatggttaccgccaggcggatgcggggcaggcagttgtcacgtcctgctttggccaggtggatacatcgccgggagacacggtccgttatacggagtacgaggacggtaccgaagagctcatcattgcggtggagcaatgggaggatgaaacagagtattccaaaggctgttatctggatatggatgaaatcgtactcctggacagcggttgttccggacaggtggagagcaacaggacccttggttttgtcaatatgaagaacctggctgtggcggcagtgatactggcggttcttggagtgttatcctatacgtacatacagtcaaataagaagaccatacataaatatctggaaggtaatattaatttctcctatcagacgtcaattacatctgatttgaacgagaaggagagggcggatgtgtactccactgacctgtccgtggatgacgcggctaaggcaattatccaggccattgacggcgggaccgaggatgtgcagaagaatggggaagatgattcggtggctatcctgacaaagggtgagtattgtctggtatacaccagcacggaccagaccaccatggttcagatcagttcccgcgcctatgtatatcaaagcacaaacacgccttaccatgcgaccggccatacccattcttattaccgcggattctattattccaggggatttttcggcgacagggacagatacagacagcggaccagcggatacgaaaactacagcggcgaaaccgttgacaccaatcccgtggatccttacaaaagctattcagacagcgtccgccagagcagcatcaattccaggcgctcatccggaggcggaatcagctccggcaaataggcgaaaaaggcgaaaaaggcaagaaagtaaaccggcagtatgtattcggacaaaaccaaatcaaaaaggagaagattatggcagaatttattacaattatggtttattgcgttttgggcacggccctcatgctctttggtacatttgtggtggatttggtgattccctgtgagttcccggcggaaatcaagaaggggaatgtggcggtgggaagcgttatggcgggtatctccgttggaatcggaatcattatccgggcagctgttatgtcccctgccggcacagcggttcacgaatcactgctgaccggtattgcctcaaccatatattactatgtggtggggctggtgttctgtgttctgggctacctggcgctgaacctgatcaaccggaaatatgatctcaataaggaaatcagcggcgggaacccggctgccggcattatggttgcaggaatgtttattgggctgtctatcattataagcggagtgattatgtgatgaaggaagggacattttcttaccgccggctgatgttcaccaccttcatcatatccggctgctccatcatatacgaacttttaatcagctccgtcagctcctatctgctgggagacagcatagcccagttttccatcaccatcggcctttatatgtgcgccatgggaatggggtcctacctttccaaatatgtgaagacagagctgtttgactggtttgtctttgtggaaatcggcgtgggtatactgggagggaccagctccctgcttttgtttttggcaaacatctatgtgcagtcctaccagcttgtgatgtacctggaaatcatactgattggaatgctggtaggcctggagataccccttctcacaagaatcattgaggaaaatgcgggcaatctgcgcattaccctttccagtattttcagctttgattatatcggagggctggcaggatccattgcgtttccgctgctcctgctgcctcagctgggatatttttccactgcctttctggtgggcagtctgaacctgggcatatccctgtttattcttgtatcctaccgcggatatatcagaatgttttccatgtggagactggtgagcggactggcgtgtgcattcatggtgctgggaatgctgttttcggaaaatgtggcatcaggaattgaacaggggctttacagggacaaggtaatcctgcgggaacagacaccgtaccagaagctggtggtcaccaaacataaggacgatatccgcctgtttatcaatggaaatatccagttttcctccaaggacgagtacagataccatgaggccctggtgcatatacccatgtcagcggctaaaagccgcaggaatgtcctggtgctgggaggaggggacggcctggctgtaagggagatattaaaatatccggaggtggagaagatcgtgctggtggacctggatgccagggtggtggacttgtgcagaaccaatcaggacatagctgccctgaaccagggctctcttgacagtcccaagctggaaatccgcagtgaggacgcctacgggtacctggaaaacaattaccgcaatgagggcggggagggatatgatggggaattcgatgtaatcatcaccgatctccctgatcccaacagcgaatcgctgaacaagctgtacacggacctgttctaccggctgtgcagcaataatctcacggaacatggggttatgtcggtccagtccaccagtccttactatgcagcagatgcctattggtgcatcaataaaactgtgggacaggaatttccatatgtatatccctaccatgtacaggtgccctctttcggcgactggggattccagctggcttccaaggataaggtgtctgtggacggcctggagcttcaggcagagggaaaattcttaaatcagtccggccttaggggactgtttttatttgcggaggatgagaagccccgcagggacaggctgacggccaacacactgtcggagcccaggctgctgcattattacctggaagcagagaaggattgggagtagaagcgcttacagatggcagcgcctgtcagtgcacaaaccagctccgtcgcaggaaaggccagccagacaccggtcattccccaaaggccggacaggaaaaacgctatgggaatgatgagcaccatgccccttaacagggaaatgatgtgggccggcacagcctgctccgtggaggtgaaaaagatggacaggatgatattgagccccgcagccggtatgcctgtaaaatacagccttagcccatactccgctatttcctgcagcttaaggtggttctcgctgttgaatacggctgttatgggagctgctccccaacaaattccggcatacagtgtcagggagatgaaaaccgcggtggcgagtccgtaccgcagtatccccctgattctggcggaatcaccccggccgtaagcgctgctgattaacggctgcattccctgggcaatgccggtgaaaatggatatgaccaccagggacaggttggctatgacgccgtaggcagccacgcccacatttccctttagtccaaggataatcacattgaacacaatgatgacaatgccggaggatacttccgtgatcagggaggggaatcccagggacaggataaggagggcggtctgtccctggatttctgttttggcgagatggaatcccttgttcttacccatccagtggccggacatgatggctatgctgataaggggcgccagcccggtagccagtacggcgccgaatatgcccatgcccagaggaaaaataaagacatagtccaacaggatattggccatgcttcctcccagcatggcaagcatggaaagcctgggatttccgtcattcctcacgaaacagaccaggatatcattgagaataaaggccggggcaaagagcagtatcattttcaggtaggtctgggtcattgcggccacctggctgtcagcgcccaagagcgctgtaatctgcggggacaggaacagtccggccaggaagaacaaaagggccgtaattccggcgaaaaacagggtgtttgtaaaaatcagatccgaaagccctgatttgcggctgatggagaatttggtggcgccgccgattccgaacatgagtccgcttccgtggataaagctgtagacgggaatggccaggttcagggctgcaagaccgctggttcccagacctttggcgacaaagaaggtgtctgccagtatatagcaggaaagaccaatcattcccagtacgtttaacgaggtgtatctggcaaattcttttaagcacgatgtttgttctgcatagttgttctgcatggtgacctcctgaacggttcccataccttccggcatcttccgaaacacaaaaagcgccagtaccttctatcttctggagcggatgaggaatgggattcctgattcgtattgctcctgggcctgacgatagaaagcctgacgctgatatttttacccggcggcaaaaatccagcctgtgtccggactgcggatgggtgggatttttatggggagattatagcatgggggagggcgggtgtcaattggagaatcctgtttacgatgttttattcctgtttattccggctgggattcctgctgatcgttcaggatcttttccatctgggcaatttccttctcctgcacatctataatattctgggccatggtgcgtatctcttcatagtctgtatactccaggatatccctggccatatccacagccatctgatgatgcataatcatgccctctgcaaaggcctggtccagactgtcaacatcagaggtatccatgtggtgggacatggagtcatcggcaaacattttgctgtactgctccagataagcgtcctcctttgtctgatccttttttccgtccgtttcatacgttttaaccagctcgttcatctgttttagttcatccttttgggcggttatgatatcctgtgcaatggtttttagctcatcgctttttccctggtagttcagatagctctcagacatcttgatagctgcctcgtggtggggaatcatgccccttagaaagtccagggaagcatttcctgatttttcgcggatgaccatatcctccatcatattcatcataatagaatcctgttcggtcaggtaacggctcaggtcgtctccggaagcgttcatatgtccgttatgtccgctgtggtcggcagcattgccggaatttgaggatgcctgttccctggaacctgtttctgtttccgtttgtgacgctgcggacgcagaggtgctttctgtctggctttgagaggtctgtccgtcatcagagccgctgcggttgttggcaaacgcagccgccacggccacgatgatgaccagggccacgcagattccgatgacccatgtacgcatatttttgttcataatctctttctccttttatccttcaatcggttggatttaatctgacataaaatagtatttgctaaattcagggaaatattctccggtgcatttttgcccgggtatttttgttttccgaaagaaggcagttgcaggttgtgttttatttaactttcacttataatgaatcataaatgttatgattttatgggtgaaaggaaacacgatgacggaaatcagtgcacagccatttgtgaaatgggcgggcggcaaaagacaattacttgaacagataaaagcgagactgccaaaacattttaatggatatatggaaccatttgtgggcggcggtgcagtatattttgatttgcagccggaaaaatccattattaatgatataaatgaatcattgatcaatgcctacctgcagataaaaatttcaccagaagaatttgccgatgctatttcagagtatgataaaagaatagcagatggaggaaaagagtattattataaagtccgggaaaactataatgataaaatgatgcgggcggaatacgatatggaattagctgttttattcgtgttcctcaacaaacactgctttaacggtctttacagagtaaacggaagaggcctgtttaatgtaccttataataacagtgtgagggaatcctgcagcaaagaaagtatcatggctgtatcacaaagccttcagaaggtgaagattatgaaaggcgattttcagaatgcctgtgatttggcagagaagggtgattttgtttttatagacagtccctacgcccccttgaatccaacgtcctttgagtcttatacaaaggagggatttgacattgaaagccacagacgtctggctgacgtgttcagagagcttacagaacggggatgctactgtatgctgaccaatcacaacacagattttatcaatcagttatatgcagatttcaacaaagtggtggtggatgtaaagcgtatgataaattctgacgcaaagaaccgggtgggtcaggagatcatcattacgaattattagaggtatatctatggaagagctgatgcggggaaaaatccaggcatattatgggactgatacaaaaaagctttatctgggagactgtcttgagctgctgcggaaaatgaagccggaaagtgttgatatgatatttgcagatccgccatattttctaagcaataacggtataacctgccaagggggaagaatggtatcagtcaataaggcgtcctgggatgagggcggggattttaaggaaaaccatgctttcaaccgcaggtggatccgcatgtgcagaagggtgctgaagcccggcggaaccatatggatatccggtaccctgcacaatatttattcaatcggaatggcgcttcagcaggagcggtataagataatcaataatattacctggaagaaaacaaacccgccgcccaatttggcctgccgctgcttcactcattccacagagacgattttgtgggccaggaaggatgaaaagaaggccaggcacttgtttaactatgagcagatgaagcaaatgaacggcgggaaacagatgaaggatgtgtgggagggaagcctcaccaggccgtcggaaaagtgggccggcaggcatcccacgcaaaaaccggagtatttactggaacggattattttggcgtccacaaaaaagggggacgtggtactggatccgttttgcggttccgggacaaccggggtggtgtccggaaagtacggaaggcagtttatcggaattgacaataacgaagaatatctggatatagcgaagagacgtttggatcagatacaggaggcactggagtggtaaaaagagattttgacgcatggcttagtaaattccgggcaagtatttcagggtaccggtattacatagattttgacaaggtagtccgcaatgtggaggatataaaaatcgagttaaacatactaaattcactgataggttctgtgaatatagaagatgattttgaaaaaataataacaaaatatccggaaaccctgtcctgtattcccctgcttctggctgtgcggagcaacgaaatctatgcccaggatgagaacggcgcgtttaagtataattttaaaacaatgaattatgatatggatcaatataagatattcatgagaaaaacaggattgtttgacctgctgcagaagcatctggtaaacaatctggttgactatgcgctggggattgagacaggacttgactccaatggccgtaagaaccggggcgggcaccagatggaagatctggtggagcaatatatcattgccgcaggatttacgaaggatgagaattattttaaagagatgtacctgaaagatattgagaataaatgggatattgatttgtccgctttatccaacgagggcaaggccgcaaagcgatttgacttcgtggtaaaaacagagtccatgatttatgcggttgaaacgaatttttacagcagcgggggctcgaagctgaatgaaaccgccagaagctataaaatgctttcccaggaggcggacacaatcgaaggattttcctttgtgtggtttacagatggcattggctggaaaagtgccagagggaatctgcgggaaacctttgaagtgatggagcatgtttataatattgacgatatggaacattcggttatgactgcattattggtgtgacacgcaggatgaaacccttcagagacggcagggtggtggttttagttgtatatatagttgcgatgactgactcgcggaacatagattccgagggtcagtttttttaatccgattgtttggaacataccttcttggaccggctggaagtaaaaaaccttgtacaattaaactattatattttaaccatttccgccgataaaaataaataggttctattaaaggcagacctatggaaagcaggaagaagaatataatgcagagataaagctgatatatgacaaatcgtaaaccataaaagcagtaggcaattacggaaacacagcctttaacggctgtgaggattgaagttagcatatatgagagatataccaatacacggataatgaattttacatagccttgacggcatatgaggattgaaggactacccagcttacaccagatatatgagctgtcccgcattgcatagggttccggttttttgtgttcctgctttctggaacggtgccttatcataccagaaccataaccacatcataaccggcgccctgcctgcagatgaatcctagtatatatgatagataaaaccatggtgatgaacacacgatggctgacgaggtgattttttgagcgataaaaaaataatcccttcccagggaagggacatgccaaaaatatgctacgaggtaagaggagaatatgcgctgtttaccaatccaatgaccaaaactggcggggatttgcattcatatccggttcctacctgttcagctgttacgggattgacggaaagcatttactggaaaccgtccataaagtggaaaccgctgcggattaggatcctgaatcccatccggtaccagtcaaggagcaagcttctgcctgtttataagacaggagggaaggatttggggtattacagttacctgagggatgtatgttaccagattgaggttgagctggcctggggaagtgaacggtatgcctcggaccgcaatgttgcaaagcactatgaatccatgctgcggtggctcagacggggagggaagctgccggtccacctgggaatcacagaatgcttcgcatatgtcaggccatgtctcttcggggatggggaaggatattatgacgctgtggatatggactttggagttatggtccacagcagggattttgaaaagggcgtaatccgtctggcgccttacaggatgcatcagggtgtaatctgttttccggatcaggaagagtgcattaccagaacattcagggcaggaggggattagcagatgaatttattgcagagcctggccggggtatatgacagccagtcttcccgggctggtgcaaagagggaggatacggatgcagtgcttctgccgttgttccatacatatcttacggcgcatataaccgtgacaattgatatgcaggggaactttctggatgcatgtgtattggatatcaggaaggatgaggtatatacaattgttccctccacggtggaatctgccagccggtccggtccggaaccgccgcctaatccgctaaatgacaaactggtgtatcttatgagcgatgcaggttcctatatacaggacaaacagatgattctggatatacagaagcggtgcagggcacatgagcagctgcttgctgcctggagcctaagcacttacgcggttccccagttaaaagcggtaaggcaatacctgaaccggaaacggacagcctctgacttgatcgcggccaatgtcatcataccagaggaggacggtaccattgacgaggagaagaaagtggcaggcagggatattttgtcctgcgtggtcagattcagggtaatggatcaggaggcagaggaagggtatgcggcagagacatggaaaaacagggaactgtttcaaagctggatctcgtactacactgcctttgtgatggagcagggaaagaaggatatctgctatgtaacaggagaatatacggtttgtaccggaaaacatacgaatggtatacgggggagttcagactgggctaagcttatttcctccaatgaaaatggaagcattgtctattccagagactggttccgggaagggattgatgcggtgtccatcggcctggtcacaagttttaaggctcactgcgctttaagctggataatcaaacgccagggacgtgtgttcgggagcaatatccgcgtgtgctgggatgcggacggcaatcccctggcctttgatttgtttgcaaatacacctgatattcaggggaaacatgaatacaggttttttgccggaagggatgcataccagagacatctggatgtgtgtttttcagaagtccttatggatcacagaatgttccatatgctggtgttagacgcacccaacaagcagaactataaaggcaggctggcaattctcgattacgcggaaatgcccgcagatgttatctgccggcggcttaaacaatggcaccggactgcctgctggcagtttacgacgggaaaaagagcatttacaggtgcaccctcggcgccggacgtggtgattgctgcttatggaaccgaatatgggggcgtacttacggttgtggataaaacagtatttgcccgtcaggtcaaccgtgtggtttccgttatattatctgctcagcccatgccgtcagacattatggccaatcttatccgcagggcgggaaatccctgtatgttccgtgaacgcagccattggatgatggtcttacaggttacgtgcgcccttcttaaccgggacgcggcaggggaaagcatcatgctggataaattaaatacggaccgcagttatctttggggccgtctgctggccattgccgattacatcgagaggctatatttccaggaggccagagaagggtgcatatcaggcgtgtgcggatacatgcagatgttttcccggtctccgggaagatattggggtataatccggagacggcttaccccatacctttacaaagccaacagaatgaggaggggacagcatgcgtgcaggcttatggaacaagtggaagccatggccacagggcaggctgatgccgatgaaccgttgggaagtgcttacctgacagggttcagctcccagcagctatattttatacagtatgattatgcgatcaggaaggaaatgggatagatttatgaacagacaggatttcatcatggtattcagggtggacaatgcaaacccaaacggggatccgctggagggaaaccgcccaaggaccaacgacaacggatacggggaagtaacaggagaatgtatccgccgaaaaatacgcaaccggttcatccacatgggtctgcctgtatttgtccagtctgacagcctttgtgtggacgggtacagttccctggcggaacgcctggctgccaggaaggacatttttaatgcccttaaggatggaaggtcgcagaaagaaggtctgcgcatggcttgcgggacctggctggatgtgcggctgttcggacagatattcgctttttccggggtcaaggccgctgccagcgcttctgtccatggggctgtgaccgtatgccatggcacatccgtggagccggtggtgattaaggatatccatatcaccaagagcacaaacggtgaggacaaaggcagcgccaaaggcaaatcctccgataccatgggctcaaagagcattgtggagcagggcctgtatgtggtaaagggctcggtcaatccgttttatgcggataagaatggggtgagccatgaggatgtggaggtacttaagaaggcccttgccaccatatttgaaaatgatgagtcctgcgccaggccggccggttccatggcggtatgcaggctgtactggtttgaacagccggagaaccatgcctgtgtgccggttcacaatatttttgacttgctggacatacaaaaccagggcagcgggtatgtctgctgcttaaaggaattgcctgatggggtgcgggtgacggagttaatttaggtttatgcagatgaaatattatattttgccgaaacgcgccgatatgagtacataggtaagcggaaagggattgattacgtatgaaaaaggtgattacatatggcacgttcgacctgttccatgaagggcattacaaattattggagcgcgccagggcgttgggggattacctgattgtaggcgtgaccacggagcattttgatgagataagaggtaaggtcaatgtgattgaccccatcttggagcgcattgacaatgtgagacagaccggatttgcggatgaaatcatcatagaggaccatgaaggacagaaaattgaagatatccagcgctacggagtggataccttcacggtgggttcggactgggtggggacctttgattatcttaaggtcttttgcaatgtggtatatctggaccggaccccggatatttcgtccacccagctgcgcaagaaccgtttccggattgtgaagacaggtatcatcggcacggggcgcattgcacccaggtttgtgggcgaagccaagttcgtcagcggaatcaacatcatatgcgcatataacccggagaaggagagcgcccaggctttttcaaggaaatgcaggataagatgctacacaaaggactatgagacatttctcggcaaggtggacgcggtgtatatcgcatcgcctcatgagactcactacgactacgccaggcgggccctggagcacggggtccatgtgctgtgtgagaaacccatgacctttaccgaggcggagaccgtggagctataccagctggccagggagaagcactgcgttctgatggaaggcatcaaggcagcctactgccctggcttccagcagttagttaatgtggctaaaagcgggaagattggggagatacgggatgtggaagcctgcttttccaggatagcggacacatttgccagggagatgacggatgagagatacggaggcgcgttcctggaatttggcggttacgccctgcttccggtgatcaagcttctgggaacggattttgaggatataaggatagacagtataccggcggaaaacggcattgacctttataccaagatccagttcagatacaaaaacggcctggggcttgccaaggccggtgtgggcgtcaagtccgagggccagctggtggtggccggcacaaagggatacatcctggcccagtccccgtggtggctgaccagaaggtttgagatacgctatgaggatcccagtgtgatagaacggtttgagccaaacttccagggagatggactgcgctatgaaatcagtgaatttgtgtccaagattaacaatccggatttatgccattttaagctgacgccggaggagtgcacggccatggccagggtgactgagaagtttatggagcagaggagaggacagcgggagaagcggggaagagcggagactgcgccaaaggcggcatcgggggctgggccggagattgcgtctaaggcggtatctgaaatgacatcagtaaggcagggagcagagggatgataagaggaatacggtatcaggatggaatggattcctgccagcttggggatatggggtttgggctggtggaatatgtgtttgggcgggaaacggagacagaaggcgcgcggccgggagctccgtgggctgacggtcagatgacagggctgtccatatcatcggatgccgtggaatgcggtcaactttcagaggccatggacctggcatctaagttaaacgcttcgtatctggtaattgaagttgttgaagctgttggagccgatggaaccaatgacggggcgggcctgtacggcatattgggaaaatgcctggaacagataaaatccaccggtctaaagatatatattgacaatgcgtattccgaagtatctttcctggcagaaacaattgaccggctgaaccgggaagccggaaccgaatgcttcggcgcctgtctcaacacgggcagcgggaacctgctgggtaagaatctgtgcggcatgattgaacacctggggcatcggatcggtctgctgcacgcgggcgataacgatggaagaaccagacagtgccagatgccgtatacatttacaagaggaagaggagaactgtcaacagactggtacggtatcataggtgccctggccatgtgtgggtttaagggtccggttgtttatgatattgccggtctttttgaagtaacccccgcctgtctgcggccgggctggtaccgtctgttatccgctgtggccctggaatgggaagggattctggagctggaggaatatttaaagaaaacgtcaagggcggagcggccggaagcagattcagaagaagaggggaaggcgggtggcctggtgctgttcggcgcagggagaatgttccataactatatggaagtgtggggagatgcatatccgccgtcctttattgttgataacaatgaaatgctgtggggcggtatgcgggagaacgtgggcatacggcctccgtctgtgcttttggaagacaaagaacatccgccatttgtcttaatctgcaacatgtatcatgcaagcattgaaaagcagctggatgctatgggcataagatggcgaagatatgacgataaatattttttcagatatcagaatctcgttgaaaaaaagggagcaggcgtatgttgaagataggagtgcagtccaaaggaatcctggacagtgagttattggatttggaaaccggatttgaacggattaagaaagccggatttgactgcattgacctgaatctggatgtgtttctgaaaaattcagagctttaccagggggagatgaaccgcttttttgaacagagtatggaagagctgcggcaatattttacctcctatcaggaaggagccgaacaatacagcctttcctggtcccagatgcatgccccgtacccggtatgggtgctgggaagggaggagcagaaccggattatgatagaaacagtgactcccaaatgcctggcaatcgccggatttctggggattccctatgtggtcattcatccctttaaaatgcagtacagacaaacctgccgggaagagagaaggcagaacctgacgttttttaagaatctgatccaaccggccagggaacataacgtgaccatatgcctggagaacctgtatgaatccgtgggcggcaggctggtggaaggggtatgctccgcgccggaggaggctgtgcggtatattgacagcctgaacgaggaagcgggtgaggaacggtttggattctgcctggacaccggtcatttaaacctggtgaagcggccgccctatgaaacggtcctgcggctggggcgcaggattaagatcctgcatcttcacgaaaatgacggaatagaggacctgcatcagattccctacacattcggaagaaaggcaggggacggatttgactgggaggggatgcttgcggggcttcgggagacaggatatgacggtgtgcttaactttgagacgttcccctccatgaacagttttccggaaagtgtgaaagaagaagtgcttcggacgattgcggggattgggagatactttgcttcacgcatagaagatgcaagatgaaggaggagcagatagacagggtgtaaccggctggaagcgctattaaagggaaggcggtgtatctatgcagagtgaacaaggtatgggaatacagagagcaggcgtaatcggcacaggcaggattgccaaccgtttcatgccggaggcaggctttgcagacgggattcatgtgcaggccgtgtataaccctcacctggaaagcgccggacggtttgcagccagatgggggcttgatgcctgcggggatttaacagatttcttccggcgggttgaccttgtatatgtagcttcccctcatgaaacacatgcagcctatatcaaggcggccctggaacatggcaagcatgtgttgtgtgaaaagcctcttgctcttaaaggagaacaggcaaaggagctgttcgcatatgcagaaagacagaatctcgtcttatttgaagggataaagacggcatactgtcccggattcaggaaaatactggaaatagcccgaagcggctccataggaaccatacgttatgtggaggcgtgctttacgaagctggaaccgggagacagcagggaactgaccgacaggatgtacggaggaagctttacggagctgggaagctattgtctgcttcctgttatcaagttattgggcaacgggtttgaagatgtgcggttcgagtccataaaagcagagaatggactggatgtgttcacaaaggcctccttccggtatcccggcgccctggcgaccgcaatctgcggacttggggtaaaagcagaaggcaggttgatgatatccggtacaaaaggatacgccacggcagaagcgccctggtggaaaacaacggatatgaaagtgcattatgaaaatccgctggaggtggagaaatattcagaaccctttctgggggatggactgcgatatgagatccgtgcatttgcggacagggtgaatgaagtggaaaacagcgtgcgcgcggggaaaaaagtgtgggaagccagggattctggtgatttcaggggactctgtgattcctgcaatgttggactgacgccggaggattccattgccctggcagatatcatggggagatttatggaaacagagagacttatataatgggagagcagagaatgaaactatgggcacacagaggctgcagccagcgctacccggagaatacactacttgcctttgagaaggcggcgcagttacatgggcttgcgggaatcgagctggatattcagctgacaaaagacgggcatattgtggtgattcatgacgagaaggtggaccggacaacggatgggagcggctgggtacgggattatacattggctgaattaaagcgtctgaagatagatgctgggtgttatcctcaccaggtaatcccgaccatggaggaagtctttgaactgctggaggagaggttgaaggcaggggcagagtcgggaacaggggcaggaacagcggcgggaacagaggcaggagcagagtcgggaacagcggcaggagcagagtcgggaacagcggcgggaacagcggcgggaacagcggcgggaacagacacgggctctaagacaggattaaagccgggaaagatggctggactgcggcttaatatcgaactgaagaacagcatccttccatatgacgggatggaggaaaagattatagatatggtccatgacagaggactggagggcgcggttgtatactcaaccttttgggcgcggtccctggagaagattcactatcttgatccggaggcagaactggggatactggatacacggatttccgactgtatgtataagttaaagggcggatgcggggcaacagcgctccatccattctggagggccatggatttgccggcagagcagctgcgggggtatacggtgcgggcctggatgtcggggcatctatatccggagaaatctaccgggaccaggctgaagatggaatggctggaggagatggggattacggatctgattttgaatgagccggaagtgtatctggaatgaggtaaatgaacgcgttacagaaggaatggcggattaacacaaatggatgtgaatggagaaaaaggatggttaaaatgagccgggagaatttgtatatagtctggcggaaattaaaagctgcaggaaacaagctctgttttgtggcgtgcaggatatttccgattagaaacaaccggatttccatatgtacgtttgagggaaaaggaggatttggatgtaatcctaaatatatcgcagaggaattgcatcaacggaatccgaactacgaattcatatggtttgtaaatgatctgtccaaagagtttccgccttacataaaaaaggtccctaatacgctgtggagcagggcattctggctatcgacttcccggatatggattgataactaccggaagccatatggcacatgcaaaagaagaaaacaatattatgtgaatacatggcatggaacgattggatttaaaagtattggtctttggcgcggccataagttttcaaagatggcgtaccttgtgagcaggaatgattcggatatgattgacggcgttgttattgattccaaatggtgcgctgaaatgtttccgaaaggaatggtatactccggtgattttctgtgggacggggctccaagatgcgatgtgttatatggtgaccggacattatacaaagaacgtttccgcaaaaagcatgggcttgccttagatgccaggattattatgtttgcgccaacattccgggagggctctgtaaatggcagaagagttgtcttttcggaactatggacactggactttatgagaatgcttaaaaatctggagcagcgattcggcggcagctggtatctgtgcgttcgggttcatccgcagctggcagccagggcagaagactgccgtgacagtcagctggagggaaagatgattgatgtaagcagagaagatgatatgtatgagatactggcagggatggatgcgtttattacggattattccagcgcagccatggatgccagctttgcgcatatgccggtgttcatttatgcggatgatattgggcagtatgttaatgacagagggagcatgctttggaacatgacaacggattccgatgccattatcagaaataaccgacagatgactccgggtatggatgtcatactgccgtatcctgttgcgcagaataacgaggaactggaaagacggattttaaaatttgacatggaggactatctgtcaaagatgaaaacgtttgaggaaaaggtagaactgacatttgacggaaaagccagtttaaggattgcgggccggatagaggcatatatgagaatgcagtagatgaaggggagttaaaaataattgtgctgtatatacaacccgtatgtgctttggttgtgattggagttaagtcttgaggtaggatatggttaatggagcaattttattagcggcaggaaagggaaaaagatataagggaataaaacaggatgttctgtttcacggcaaaccgctatggagatatgcatatgaaactgcattagacgtcgtaggtgagaactatatagtagctgtgggaaaggatattccgggtggaaacactagaaccaaatccgttttaaatggattaaaattccttcctgatgatacggaaagagttgtgattgttgaggcagcgcgcccaatggttacaaaggagcagattcttgaactgctaagagatggacatccctctgtatctttcgtaagacctttagtaaatacagtcatttatagggacgggagatatattaacagggatgaattatatgatttattaacacctcaggcatttgactatcacatgttgcttgaggcatatcaaagcggcagattcacagatatgacggatgagacaagaataatgtttgaatattatagaattaaaccatatttaattgaaacaaagaacaacctttataaggtcacgtatcctggtgacttagatataattgagtcaatatttcaatcgcaacaaaaggcagagggggcgtgaacaatcaatgaaaaacaaagtgttaattacagggggaaacggtgacattgcccaggcaataaaagaacagttggaaaatgagggatatgatgtttacgcaccatctcgaaccgaaatggatgtaactgattgggacagtattgaaaaggcgatgaaaaaattcaaaccggatgttctgattaacaatgccggatatgtagttccgcattccataaaaaaaggtaatttacttaacacaaagaaacacatagatattaatttggcaggagtcttttactgtacggaaattgcattaaaatttaatcctaaccttgctattgtaaatattggctcggcagccgctatcgaaattcatgcaacctggagtgaatactgtgctgcaaaagctgcggttgttatggctacacggtgttgggctgaagatggtttatacgctgtagtgatatcaccgggaagaactaggacaaaaatgagaaggagcctttatcccgaagaggatcaaaccactttgcttgaaccctccgattttgcaaaagtggttgttaaggcagttcataaagagtatgaaacaggtgctcatatcgtagtacgtctaaagaatatggaggaattgatgaaacaataaatggatcaacgcaacctgctggttggtacgaaaagcccagcaggccgtaactcatgctaaattaggaaacttttaattactggaggaacaaaaattgaattgttcagagtacctggtcgattttttagtcaagcgtggtgtaaccgatatatttggttatgcgggcgggtatatagttccatttatggatgccttatattttcgcagggacgaaattaatgttcatgtttgttatcatgaacaaggatgtgcactagctgcaaatgggtatgcaagaacaagcggaaagattggtgtatattttaccacatcaggcccaggggctgtaaatgctcttggagggcttgtagatgcttggtttgatggaattccggttatggggatttgtggtaacgttcctacaaatgaaatgaagggattttctggaataaggcagaatggatttcaggaaatggatattgtgtcaatgacgcgtaatatcacaaaatactctgttacggcaaatagcagcgagggctttgatgatattatcagcagggcatataatatggctatgcttggccggaagggaggcgttatcattgattttccgcttaacatacaacaaaccgatattgttagttggtaatggggtcaggacagccggtgcagcaggcttagttcatgaatttgctcttaaaaccagtataccaattttgacaacgatgaatggcgtcgatttagcccaggacaggcttcacataggttttattgggacacatggcaatagagtggctaatatgattctaaatgagtgcgaccttttagtttctgttggtgcgcgcttgggaataaggcaggttggccgtcataccgaaaattttgcaccaaaagcagatttagtcagagtagacatagatgaatacgaattaagcaggaatattaaagaaaaagaaaaaaataccaaaccgatgcccgggactttatgcgtatgattttgaatgagaatatccgagattattctttatggaaacagcaatgtttagaagtaaagaaaatccttgataagtatgataagcaggaaggcaacctggcagttgaaaagatagcctctatgttgcctgaagatcctgtcgtatcagtagatgttggtcaacatcagtgttggtgcgcccaatccctggttttaaagggacagaaagggcggattcatattagcggcggttatgggactatgggatgtggattgccatatagtataggggcatcaatatcaatgaataaaaatattactttctgtattactggcgatggtggatttcagatgaatattcaagagttggaaacagttaggcgcgaaaatcttcctataaaaatttttattcttaataacagggtattaggaaagataagtgaaacccagcacaccaaccataaggatcggtatgcaaatactactgaagaaagtgggtatacagtgccggatttcagaaaaatcgcggaagcttatggtattagggcggcaacacttaattcttatcatgaacttgataattatcagaattggtttcgggataatcagccctgtttgtttaatataatgcttcctgaacgcagcagcttaactcctaaaataaaatgggagacttctacaattactccccgattagatgatcatgtaatcaatcaggttgaagagatattaagaatttaaatggaatgtaaattgctaaagagctgcttgggttctaatatcgaaaaagcagggtacagtgctaccatcaaaataaggctgtacggaagcaggcataaggggatggaataataatggttaaaatttcggtaattgttcctgtatataatgcggaacagtatataagaaaatgtttggattctattattactcaaacttatcaaaatttagagataatctgtattaatgatggatcacaagataatacagcagaaatattgaacgaatatgccaaagcggattcgcggcttgtggttatccaccggcagaataaaggcttggtaagcgcccgaaaagaagcaataaaaatagcaagcggagagtatgtttgctatgtggatgcagatgactggattgattctgaaatgtatatgattatgtataatgagggcatagaattgggggttgatattgtttctgttggaatatgtagggattttagaaatggtacgtcatatctggaacccaatattataccacagggaatttatagaggagaggaaataaaaaataatatattacccaaagtgattgatacggataatttttttcagtgggggttatcacttagcttatgccattacgcatttaaaaaagaaattttaatacataatcagttggttgtggatgacagaattcagatgggagaagatgctgcgtgtagtattttctgtttgtatcagtgcaactcaatcgcgttaattgatcgatgtttatatcattacaggcaaagtgattcctctatgaagcggacttctaaaaagaattctctggagcgctgtcagattttatatcgcttgatggttcaaagagcatctatatttcaagagagagaggtattgcttaaaaagatagattatatgcttttttttgctttgttgcaatcagcatattcggtattgttagagggaaagtctttcctgtttccttataggaatgttcgtaaaggtgaaaatatcgttatatatggagcaggaatatttggtgaagagatgtacgttacagtgaaaaaaacgggattttgtaatattacaggctgggtagacagcaattatgaagcttaccagagtcatttaaagccagtttcggaccccgcagatataataaggatgcaatttgatcatgttgtaattgctataacaaatccagactatagacggattgttattcaaagactgcaggcgctgaaaattgcatcagaaaaaatatctgatattgatataaatgtattggtacgtgaaatgttgcctgaaaggctattataagggataaaagatattatttaatattacttatgggaaacttataatagaacggcaggtaacgcttagtaaaagaatggagtgcaggaatggttaatctattacactgctcaaaggaaaactttgctaatcttgttacacataaaaaaattgtttgttatggagcaggaaagcgtttttctaaatttgtagagttctggttatcaaaagatagtatacacaatatactgtgtgttattgactcaaagtatagtggttcagttgtcaagacaaaaatctaagctttttataatgaactgatatatgtaactgggtagggg

SEQ ID NO: 3141 - DNA, 751 bp, Unknown
  gut microbiota DNA sequence
ccgagggattttaagtcccttgtgtctgcctattccaccacacccgcataagtactcacaggtacttttttgcacgtgccacagctgaaaacgaggacctttacgtgcgctgcactgatgtccttaagctatattttaacggcacgctagtgggcgaaggtggattcgaaccaccgaagctattagcagcagatttacagtctgtcccctttggccactcgggaattcgcccagatattgcttgaataagcagtgattataataccacagactacggaaaaaatcaagcattttgtgaagatttgtctgtggtttatcgcagtttatttgcagggtttatctgcggttatctgttatccatgaaggtatctgcgtttcagcagattaggttactatacatcagggcaacggccgcagccacccaaacccaggcagattccgcagcaccccaaacacaagcagcaccccaatcattacatagaaaacacaggcctgaacccgtgtaaggcgtgtgcttccggtccttacataccgcacggccatccatccagccatgaacagtcccgggggcagcaggagaaagatggctgcatttgccttaacggcagatgcaaaatccagacggagaagggacagacacatccggcttacgccgcagcccgggcagtacagcccggtgaccgtatgaaacaggcagggaatcaggggacgtcccgccagaatacagataaatgcataaaacaggccggct

SEQ ID NO: 3142 - DNA, 3530 bp, Unknown
  gut microbiota DNA sequence
atgtaaggcgtgtgcttccggtccttacataccgcacggccatccagacagccatgaacagtcccggaggcagcagaagaaagatggctgcatttgcctgaaaggcagatgcaaaatccagacggagaagggacaggcacatccggcttacgccgcagcccggacagtacagcccggtaaccgtatgaaacaggcagggaatcaggggacgtcccgccagaatacagataaatgcataaaacaggccggctcccaggagcccgcctgtttttatgcatagtgtccgaagacgtttatgcattagggagatacttgttcagctcattctgcagcagggcgtaagctacgatgcccagtccgaacaggctgagaagcagatagaccaccggtgcgcttccccttggctcgccgtgctggtcatggagcatctcaacggcattgcccatctggtacatccagtacagggcataaatcccgcatgtaatcagtgagaacaggaaaaccagtcctccgcttgtaccctgcctgccggagagcgcgttggtttcgtcgttcagtacgatcatccaatagatgccgtaaattccgcaggtaaccaggctcagcaggatacatactacgatgttgcgctgtttcatacgtatatcctccttggtatggtatgttcgtgcaatacagcatagattctatcatagacataactgtttatcaacaaaaagcgttacaatgttcatctttttgttctctttttacttcctttttacacagattacgtcttgggccccggggaaattgctggcacagtactggcacattgctggcaaaatctcatttttatggacgaatggggccggatatgctatactaactaagataggcgtattctgattttcggatacgaatggaggcagactatgagagataaaggaaggacgcgggggattttcaaggtctacctgcagtggccgctctttttgtcggtccttttaatcgtactgactgcggttgtggcagcggtatccataaaagccggcattatagtatcggtctttaccattgtctatatagggattgccctttggctgtatttttcaagaaaaagaggcatactggccgggctcatcgcgttttcgtccgcttatgaccagagcaggcagaacctgctggaagagatgctgatgccctatgcggtgacagacggatccggacatctgttgtggatgaaccgggagtttacggcaatcctggaagaagacaagaattcatataagaacattacagccgtgtttcctgagattacaaaggaaatgctggctaccggcggggaggttgtgagtattcacagctgcctgggagacaggaagttccgtattgacttaaagcaggtcatggtggacagtcttgacgcggccgtggccgcgggagggcttgagggccagggctcatctgttacggccgtctatctgctggatgagacgcagactcttaagtacatgcagcagattaatgaccagaagctggtggcgggcctgatttacctggataactatgacgaggccctggaaagtgtggaggaagtccggcgctcccttttgactgccctcatagaccgtaagataagcaaatatatctccggcatgaacggtattgtaaaaaagattgagaaggataaatatttcttcgccatcaagcagcagtacatggccaggatacaggaagaacgtttttccatcctggaggatgtaaagacagttaacataggcaatgatatggctgtaaccttaagtatcggtatcggtatgaacggcgacagctacagccagaattatgaatatgccaggacctccattgacatggccctgggacggggcggcgaccaggcagtggtcaaggactccgacaagattcagtattatggcggcaaggcccagcagatggaaaagaccaccagggtgaaggccagggtcaaggcccatgccctcagggagctgatggagaacaaggaccgcctccttattatgggacaccgtctggcggacattgattcctttggcgcggcagtgggcatataccgcattgccatgtccatgaacaagaaggccaatatcgtggtcaacgaggtgacttcttcggtgcgtcctatgatggagcgatttacgggaaatgccgaatatcctgaggatatgctgctcacgggcccgaaggcggccgagctggtggatcaggggaccatgctggttatcgtggatgtgaaccggcccagtattacggatgaaccggctcttttggagatggtgaagacggttgtggttttagaccatcacaggaccagcagcgaaatcatagacaacgcagtgctttcctacgtggagccgtatgcctcgtctacctgtgagatggtggcggaggtattgcagtatattgcagacggcattaaaattaaatccgccgaggcggatgccatgtacgcgggcattgtcatcgacacccagaactttaccaatcagaccggcgtcaggacatttgaggcagcggcatttttaagaagaagcggcgcggacatcaccagggtgcgcaagcttttcagggagaatatgaaggactaccaggcaaaggcggacgcggtcaggaaggcggaggtgttcatggatgcctttgccatcagcgagtgctcagccgaagggctggagagtcccaccatcatcggtgcccaggcagccaacgagcttctggaaatccgcggcatgaaggcttcggtggtgcttacggattataacggaaccatttatttcagcgccagatccattgacgaggttaatgtccaggtcatgatggagaagctgggaggcggcggacaccgtaccatagcaggcgcccagatgcagggtgtaaccgtggaagaggcaaaggaacggttaaaagacgtcatccgccagatgatggaggaaggcgaggtatcctgataagggatgcatatagacacagaatcagaaaggaagtatgagacatgcaggtagtattactggaagatgtgaaggcattaggaaaaaagggtcagattgtgaatgtaaatgacggctatgccagaaatttcattctgcccaagaagcttggggtggaagccaattctaagaatctgaatgatttaaagcttaagaaggccaatgacgacaggattgcggcagagcagctggcagcggccagggagctgggagcaaagctggatgagtcctccgtgactctgaccatcaaggcgggagagggcggaagagccttcggctccgtgtcctccaaggaaatcgccaaggccattggggaccagctgggaattgatattgacaagaaaaagattatgctgagcgatcccatcaagtccattggcagcttcgaggtgcctattaagctccataaggatgtgactgccagactggctgtcaaggtagtggaagcataaaattatagcgcagacacaggacccgcctcaacaggcgggtctcatagattcagatacaggagacgagtaatatgga

SEQ ID NO: 3143 - DNA, 800 bp, Unknown
  gut microbiota DNA sequence
gttaagctccataaggatgtgactgccagactggctgtcaaggtagtggaagcataaaatcatagcgcagacacaggacccgcctcaacaggcgggtctcatagattcagatacaggagacgagtaatatggaagaagccctgattaagcgggtgcttccccacagtctggaggcggaacagtcggtcatcggttccatgctcatggacagggaggcagtgattgccgcatcggagattgtgacaggaagtgatttttaccagcagcagtacggaatcatgtttgacgccatggtagagctgttcaatgaaggcaagcccgtggacctggtaaccctccaggaccgtctgaaggaaaaggatgtgcctcctgaggtgagcagcctggattttgtgcgggatatcgtgaccatggtgcctacgtctgccaatgtaaggtcctatgccaccattgttggtgagaaggcagtgctgcgcaggctgattaagaccacggaggagattgccaatacctgttatgccggaaaggagcccctggagaacatactggcagacacggagaaatccgtttttaacctgctgcaaaaccgcgggggacaggattttgtgcccatcaagcaggtggccatcaacgtgctggagaagattgaggatgcctataagaaccagggaacagtcacgggtataccatccggctttattgacctggattataagctttccggtttccagccttcggatttcattctgatagcagcccgtccttccatgggtaagacggcctttgtcctgaacgtggtg

SEQ ID NO: 3144 - DNA, 4208 bp, Unknown
  gut microbiota DNA sequence
acgggatatcgtgaccatggtgcctacgtctgccaatgtaaggtcctatgccaccattgtcggggagaaggcagtgctgcgaaggctgattaaaaccacggaggagattgccaatacctgttacgccggaaaggagcccctggagaacatactggcagatacggagaaatccgtttttaacctgctgcaaaaccgcgggggacaggatttcgtgcccatcaagcaggtggccatcaacgtgctggagaagattgaggatgcctataaaaaccagggaacggtcacgggtataccttccggttttattgacctggattataagctttcaggttttcagccttcggatttcattctgatagcagcccgtccttccatgggtaagacggcctttgtcctgaacgtggtggactatgtggcggtgcgcaagagcctgccctgcatggtgttcagtctggagatgtccaaggagcagctggtgaaccgtatgctttccatggagtccaatgtggattcccagaagctgcgtaccggctccctgacggattctgactgggatgcggtggtggagggcatcggcgtcataggaaattccaagctgataattgatgacacccccggtatatccatatcagagctgcgatccaagtgcaggaagatgaagctggagtatggactcagcgttgtgattatcgactacctgcagctcatgagtggcagcaagaagggcggaggcgataaccgccagcaggagatttccgatatttcccgttccctgaaggcccttgccagggaacttcatgcccctgttattgccctgtcacagctgtcccgtgcctgtgagaccagacaggaccacaggcccatgctctctgaccttcgtgagtcgggggccattgagcaggatgcggacgtggttatgttcctgtaccgtgatgattattataataaggatacggagcatcccaacgaggcagaggtaatcatagccaaacagcgtaacggccccattggaaccgttacattgatatggaaaccggagtacaccaagtttgtgaatgctgccagacctcagggcggcggacaggacgcataaaaatttttctaggatgtcataatatccattctcaatgcatacactaatagtaaggcaggacatgcctgttaacttgtgaaggagagaatggctatggatgaagtacattatctgatatcggatgcgtccaaaaaggtcgatgtggaggcccatgtattaaggtactgggaagaggagctggaacttgatattccccgtaacgagatggggcaccggtactatacggatttacatatccgcctgttcaagcaggtcaagaacctgaaggagaaggggtatcagctgaaggcaatcaagcatgcgctgaaccaggtcctgaaaaaggacggtaaggcccagggagagctgtccgatgaaatcctggagcgcgacatgagcgcggcgcttaaggaatttaaagaggaagacagcgcaacgtccctcagcactgtgaagggcgatggtgtgtccgtggtcgccatggaagagaagatggaacagtttcagcagatcatgaacctgattattggacgtgccctggaagtgaacaatgaaaaactgagccaggatatcagctgtctggtcaatgagaagatgggcaaggaactggagtttttgttccaggcttcggaccagaaggaggaggaacggttccgccagctggacgagacgctcagaagctaccagaagggcggacaggcagaggcggcagcggccaaggttcccttttttaagcggcgcagatttgggcgaagcggaaaaaagctcagggatggaaagtaattgcagatacagcaggagacggcacctgcaccagtggattaacaccatggtgcaggtgtctttttctgttgtttttccatttttttataaacagggaatggttattttatagtactttcaattttcttacgaccttaatttttgtatcgctattccttaagaaatgtgttagaatgaatttgatttgagctttttgacataagaagaagcaggaaggataagttcttcatgaattcaaaatacagaaaatatgttacatatacggcagccgtaggcgtgctgaccctcagctctgtcctgggcggctgcaccaagaaatccacatcagaggtgggggatgccacgccttcagaggtcaatgttatacaggctgtgcctgagaccattgcccagctgggcctgaacgggcaggtgctgccgggactgaacgatattaacctgccggacgcggagccggcacctgagtacctgagaattggggtgcgccatgagatcatcaagagactgcagcagcgtctcatggacctggggttcatggacaatgatgagcccacggattatttcggagagatgacccagcaggcagtcaagcatttccagaggcagaatgagctgcctacagacggtattgtgggcaatgttacctgggatgccattatgtctccggatgccaagtattatgcggtttccaagggaactcagggtgatgatattgagcgcatccagcagcgtctttatgagctgggatacctggcaaccgctgatttggtcacaggcaacttcggtgattccacggaggcagccgtgttaaagctccaggaggtcaatggactggagcaggatggaaaggtgggacagaggaccatcaacctgctgtacagcgatgagattaaacctaatttcctttcttacggtgagaagagcgatgtggtcctggcctgccaggagcgtcttaaggaattgggatatctgaccactaccccggacggggcttacggtgaggacacggtagtggctgtgaagcagtttcaggccagaaacgaccaggtggtggacggctatctgggaccatccaccagaattgctttaaacagcccggacgccagggccaatggcctgatgctgggtgagcgcggcgacgcggttaccaaggtgcagcagcttcttaacaaacacggttatctggtttccggcaacgtgaccggatattacggtgaagccacggagaacgctgtcaggaacttccagtcacgcaacggactgacctctgacggtctggtaggcgtccagaccatggccaagctgaccggcgacaatgtaaggcgtccggcggctaattccagcggttccggcaccaccacaagacctaacaattcaggaaacagcggcaatacaggaaataacggcggttccggcaatacgggcaagccttccggcaataccacgccgcctgtgagcataccggcaagcggaggcgcatccgcacttatatcggttgcctcatccaaactcgggtcaccgtatgtatggggagcaaaaggaccgaactcctttgactgttccggtttcatatactggtgtctcaaccaggtgggcgtaaaccagagctacctgacttcttcgggctggaggaatgtgggccgttacacgaagattacaaactttaatgacatccaggccggtgatatcgtggtggtaaggggccatgtaggtatcgcggcaggaggaggcacggtgattgacgcttcttccagtaacggacgggtggtgcacagaagcctgagccagtggtgggccaacaactttatctgtgcatggaggattttctaacaaacataaaggtactggaatatgaaaaggagggcgtttggtgatgcagaccatactggtatgtgatgatgacaagcagattgtggaggccattgatatctatttgacaggagaagggtttaaggtaatcaaagcttatgacggctatgaggcgctggagtatctggataaaaatgaagtggatttattgattgtggatgtgatgatgccgggactggacggcatccgcaccaccctgaaggtcagggagaacagcagtatacccatcatcatcctctccgccaagtccgaggatgcagataagattctgggacttaacattggggcagacgattacattacaaagccctttaatcctctggagctggtggccagggtcaagtcccagatgcgccgttatacccagttgggaaacctaaaccagcaggcggacggacagatttataagtgcggcggccttcagattaatgatgacaacaaagaggtgaccgtggatggcgatgccatcaagctgacgcccatc

SEQ ID NO: 3145 - DNA, 752 bp, Unknown
  gut microbiota DNA sequence
ctgggaaacctaaaccagcaggcggacggacagatttataagtgtggcggccttcagattaatgatgacaacaaagaggtgaccgtggatggcgatgccatcaagctgacgcccatcgagtacaatattctgctgctgctggtgaagaatgcgggaaaagtattttccattgatgagatttatgagcagatatggaatgaggaggccattggcgcggataatacagtggccgtgcacatccgccatatccgtgaaaagatagagattaacccaagggagccaaagtacctgaaggtggtatggggcgtaggctataagatagaaaagcagtaggtggttgcatgacagatgaaaagaggaagttcagacggaggaaactgttcctgaccctgttccatattatttttgtgtctatgtccgtattcgggatcagtgccatgtaccttaattccaattacggaaaaggtgtaaagtggatatatgaggatgcatacgaggattctcctcagtttgacaaacagctgacagaggatatcgaccgcatatttacctatgtgggttataaggatatgttcgagaccgacggaaagctggatatgcataaggtcattgtaagggtcagcaatggaccgggggaacagggaacggagtggactctggaccggattgtgcgctatatcaagaccaggggatattatctggatgagaatttccaattggccggatcgcctatttccatggacgatgacgag

SEQ ID NO: 3146 - DNA, 2987 bp, Unknown
  gut microbiota DNA sequence
aggggaacagggaacggagtggactctggaccggattgtgcgctatattaagaccaggggatattatctggatgagaatttccaattggccggatcgcctatttccatggacgatgacgaggaagagataaccgtggatttccagagctataatccggattttgtggatgcggatgcaggagatgctccaaggatgaccatggaggatctggccctcgatatactggttcatctgagtgaatattacaccatatattataattacatagagaacgacaccaacctcaatttccgtatccagtacacaagcaataagggggttacaaaggtatccaccaatgtgccggataagaccatggaagagataatagggaccgggaaatacctctttgtgccgggaaataccatccgcatggagaccaacatggccacggttcctgccaatgcggccacgcttctggagatatggaatccctataaaaacgataagaattacatggtcctgtccgtggacaccagctacccaaatacggatgcgtattccatagaggcaaaggcatataaggaagccagaaacgagtttattctgggcatgggaagcgttatcctgggaggccttggatgtgtggttacactggccatgctgatgcttatgtcaggccacaccacggacggaagcacggaaatacgcctgttccctattgacgagattcacacggaactatgcctgattctctgggcggcggccacagcggtgtttatctacataggaaggtatgtgggtatccggctgttcagcctgtttgctcccaatgaacaatggaattactggaataagatgattaaactggtcattgtgtacgggagcgttgtattgtgcggctttgatttgctgcgcaggtataaggccaggaccttgtggagcaacagcctcgcaaaaagggctttggaagcttcaaaggactatgtgggtagagtcagctatgcagtgggcaccgggttctgctacctgttgtttttaggatttaacgcaggtatgctgtggggactgattttcctctttttctataaggagaacaggataagctaccagattatgttctatgtattcgtggtgctgtacctgggactggatggatggatataccatcagctgtttaaaaaatcagtgcagagggatgtgctggacatggctgtcagcactatctcccagggggataccagctatcagattgatacctcccgcctgtcaggcaaggagcgggacatggcagagcatctcaataatatcagcagcggtctggattcagctattcaggagcaggttaagagcgagcggctgaaggcaagcctgataacaaatgtatcccatgacatcaagactcctcttacgtccattatcaattatgtggaccttctgaaacgggagaaaatacaggatcccaagattgccgcatacctggaagtgctggaccagaagtctcagcgccttaagactctgacagaggacctggtggaggcatccaaggccagttcaggcaatatgaagttagatatatcggatattgacctggtagagctggtacagcagaccaacggtgagtttgaggagcggtttgccatgcgcaggctggagctggtttccaacataccggatgaggtgcttatcattcaggctgacggacgccgcctgtggcgtgtcctggaaaatctctataccaatgcagtgaagtatgcaatggagcacagccgggtctatgtggatgtgctggacgaggacggcaaggccatatttacaatcaagaatgtttccgaatcatcactgaatatcagtccggatgagctgaccgagcgctttgtcaggggagatgtgtccagggccacggagggaagcggtctgggattatccatatccaaggatttgacccagcttcagggcggtgagttccaggtggttatagacggggatctgtttaaggctgttgtgtcattcccggtaaagagagttgagtttaaggcggataaaacgtctggggaatccggagacatatctcaggattttggtttcgaggaagaaatataattttaggaaaaaaatggaatttgatagaaggattatgataaatatttcacgaacaaattgtaaaatatttgaaaatattgtggaataaatcttgtttattggtcattataaccatgaagattttggaaaaaaggcgccggaagatatcttccggcgcctcctttttccatgtgcaggcggattttactgataatcaaatacgttaatccagctttccagcagttccttttcctcaggacgtttgtaagccagctgggcagctgccacgatggggagccagccctgtacataacgcttttctgtgcccgttttatcacagaacagatccatgtacatatcagctatcttcttatccttcaggctcagaagcagataggttctggctacatcggcacttgcgttgccctgggaagcgtgtacccagtcaaccagataccatttgccgtcgtcgcctacgatgatattagatgggcagaaatctccgtggcacagtttggtgtgctttggcatgccgtccagccttgtaagcagctcatagcgcaggttttcatccagctgttcctcggatttaagggcgcggatggtcttttccttcagcttgtttaacagtgggcaggcctgggcaaaaatcaacaggtgtaaatcaaccatctgctccagatactcccctgtcttgtcgggattttcttccatcagctgctgaagggtcttgccctccacaaattccctggtaatagaccatttgccatcaattacagatacccccagaaccttaggaacattcaggacttcaatggtttccacacgtgcgttgcacagggcttcattcaggacctcggcttttgggaagccttcgcagaattccttgatggcagtgcttccgtcacggtaaacggattttgtt

SEQ ID NO: 3147 - DNA, 2620 bp, Unknown
  gut microbiota DNA sequence
aggattttcttccatcagctgctgaagggtcttgccctccacaaattccctggtaatagaccatttgccatcgattacagatacccccagaaccttaggaacattcagggcttcaatggtttccacacgtgcgttgcacagggcttcattcagaacctcggcttttgggaagccttcgcagaattccttgatggcagtgcttccgtcacggtaaacggattttgtttcgctactggaaattaattgttttgccataactatactctccttccacacattgtaaacggtgctgcgacaggtaatccatcgcactgcctttattctactacaacatgactgaaaagtacatacccaatttgataaatttttaacgtacttttaggcattaaaaagtacatatttcttaataacatttcttaaaaacggaagattgcagttccgtatccaggaagaggataggagaaggaatagggctgtccgtcgcattcgcttttagaggatgagaaacagggagcttctgctgccttataagctccgtggttatccaggagcagggtgtacctgccgcgctttgggacacctacacggtaatcgggtctctccaccggagtaaagtttataatgaacatcaggtttttcttacctgtctcatcccggcggatgaagctgaagatacttctgtcgccgtcattggcattaatccactggaaaccattccagtcattgtcctggcggtaaagggaaggatactttttgtacagatggagcaggtcctttacatagttctgaagctccctgtggtcatcctcgtctgtgaggtaccagtccagggaaaccttttcatcccattcatggagctggccgaaatcctgtcccatgaacaggagcttcttgccgggatggcccatcatgaaggtgtaaccggccttcagattggagaacttgtccctgcccaggccgggcatcttgttaatcatggagcatttcaggtgaaccacctcatcgtgggaaaggaccaggatatagttctcacttgtaaagtaggtaagtccgaaggtcatgcggtgatggttatatttgcggaaataggggtctagcttcatgtactccaggaagtcatgcatccatcccatgttccacttgaaggtaaagcccagcccgtcctgttcgggatgctccgtcacctttggccacgcggtggattcctcggcaatgacaagagcaccgtggttgcgcccctggactactgtgttcaggtgcttaaagaactcgatggcttccaggttctggttgcctccgtctttgttggggacccactggccttcctggcgtccgtagtccaggtacagcatggatgccaccgcgtccaccctgaggccgtccacgtggtactgttccacccagtagagcgcattgctgatgaggaagtccttgacctcatttttaccgtaatcaaataccttggtgccccagtccggatgttcgcccttcctggggtccgcatattcaaaaaggggttctccgtcaaagtcagccaggccatgggcatccttgggaaagtgggccggaacccagtccagtatgacgcctatgccgtttttatgcaggtagtttacgaaatacatgaactgttccggtgtgccatagcgggaggtgggggcaaagtatcccgtcacctgatatccccaggaaccgtcaaatggatgttctgcaatgcccatcagctccacatgggtatagcccatctcttttacataagctgccagctcatgggctgcctctgtgtatgtataaaagccatccttttcaggcctgtcccgtttacgccaggaacccagatgcacttcgtaaatgctcatgggcagcttctgtacatctgcctgggtcctcttttcgatccaagagctgtcagtccaggaaaatccctggatatcggctgtgacagaggctgtacccggacggtattccgcgctgaaggcaaagggatctgccttgtagagaatcttgccggactgggtggtaatggcgaatttatagagctctcccagcttcatgcccggattgaaaatctcccagataccggattcggagatacgttccatggggctggcctccggattccagttgttaaaatcgcctaccagatggacctcttttgcgtggggggcccagacggcgaagtagataccttcctttcccttgtatgtcttgggatgtgcccctaatttctggtaaatatcatagtgtgtgcctgccccgaacagatagcagtccaggtcagatatgaaacctgtggcagaagcctttttctttgaagatgctgcagtgcgttttttagctaccatatcagttctctcccttgagtttcaggacagctccccagttgccctttagttttatgtggaccttcccgtctgaaatggggaggcggtctgcgggttccagaagattgactgcctcgccggcctgaagcggaacagggatggccagttcggccggctcatcgtcattgtttaccgcggtgatgatgacagagtcttcaccgtgtctggcaaatgcatactggcggttggtcagcagcagttcctggtaacggcccgtgtgaagcggctcctgctgg

SEQ ID NO: 3148 - DNA, 358 bp, Unknown
  gut microbiota DNA sequence
ttcatcgtcattgtttaccgcggtgatgatgacagagtcctcaccgtgcctggcaaatgcatactggcggttggtcagcagcagttcctggtaacggcccgtgtgaagcggctcctgctggctgtgaatctgtcccagctgtgcaatcaggtctgtaagttcgcagtgaagttcaccttcctgctctatggagatggcgggacgcagcgcttcatcgctggtgttggtgcgctttccctcaacgccccattcgccgccgtaatagatggatggaattccgggcagagtgaagaggcagatgtatatggggaacaggtgctccctgagcttaagctttgtggcaatcctatcctcgtca

SEQ ID NO: 3149 - DNA, 11225 bp, Unknown
  gut microbiota DNA sequence
ttttccctcaacgccccattcaccgccgtaatagatggatggaattccgggcagtgtgaagaggcagatgtatatggggaacaggtgctccctgagcttaagctttgtggcaatcctatcctcgtcatgattgtccacaaaggtgtaaagctggcgtccgatggcctccagccgtcttacgttgtgggcaatctcaaagaagttgtggtcattgaagccggagtaaaggcttttgtgaagttcgtaattagtgacggagtgaagcatctcattgttaacccagcggctgtagtccccgtgtatcacctcacccataagccagaaatcttccttcatagcctctgtctggctgcgcatttccttcatgaagttaaagtccagcacattggcgcagtccaggcgtattccgtcaatgtcaaactcgtcaatccaaaaccggatgacatcaaagagataggacctcacacccgggttaaagaggttcaggcagggcagttcaaagtgtccctgccaggcttcatatccaaaggaatcgccgcaggggctctgccagtcgaagttcactcccttataccagtccttataaggggaatcccagcgcttttcctgtatgtccttaaaggcaaaaaactcacgtcctgtgtgattgaacacaccgtccacaacaacctttatgccctcctggtggcattggtccacaaattttctgaaagaaccgttatcgcccagacgccggtccaccagtttataatccctggtatcgtatccatggctggtggattcaaaaagcgggcctatgtagatggcgtttgcgcccagggaccggatgtgggaaatccacttgtctaattcttcaaaacggttggttacttcggttgcatcattgtgtttgggggctccagtcatccccaggggatacatgtgatagaacactccccgctcataccaggtgctcatgttgttttcctcgcaatctttatgtagtcatatgttacagtgcccggagggggatagtactgtaagtactaatcctcctggcttttaaatttacgcagcaggaactggtagcgcagctgtgccgcgttcagttcgtagatatagcagtctatcagggtagggtccacggcctgctcaaagtggttcctggcggcttcgatggcacattttgtgcgttcgatttccacgcgcaggcggatgagttcaggtctggggcgccgcgccctggtcacagcggacctggcagcagcagtctccctgactgctttcatgatgtcaaacatatgcttcatctcccagatattgatagaaatagtatatctggaaaatggcatcttatgcatgtgggccggcagaattaaattttaatgctgactgtcagtacaggaattcttccagtctgtatcccagctccatcagccggcggttggattccctcagggtgagataataatagttggccgtgccttcctggcgtacacccacaatacccgcatcctttaatattttaaggtgatgggatatggccggacgggaaaggctggtccgccgggtaatttcatttacattgaggccgtattgctcgaaatggatggggccgggcgtctgccttctgtcaagggcttcctctgtcagtacctctatgatggacagacgcatctcatcgcccagggcaatgaacagcggcatacaggcatgaaaacgtttctgcagttcctgggcagttgtcatctgccatttcctcctttggtttaaaaatttgaaccaatttcattttaccatgtatagagaggaaggtcaaggaaatcgggtgtgaaatgcataaaattcacccttgacatctgctggaaaatccttcataataaaacaacattcaacacagtctattttatgacagtctgatttatctcaatggtattatttacgtcaatggttttgtattgtctggctcaggcagaaatttcctcagaaaaaagtgacagatggaacggagagagggggtagtgtattcagtttacatagttttatgtcgtatgccttgtacggcatcatgtcttattgtgcctttatggatatcaggcgttaccggatacctaacagggccctggtggcagcagctgctgcagggctggctgtttcggtggaggcctgggtgtccggagccgggaatgttgggttatgggcggcaggcataggcttttggatgcaggatactggtttttgggcggctgcagctgagggcgctgctgtatttataatgcggctgatgttggcggccgcagccggtttcccatttttcctgctgcggatggtgggggccggggatattaaatttatggcccttgtggcaggctgttttggcctggagagaggattttggtccgttgtgattggtttgtgtctgggagctgttctggctctcggaaagatgctgcgagagggcagcatatgtcagagattcttgtatttaactgcctatatcaggcgtttgattcagagtaaagaaattgaggcgtactactgcccggagcgggatggatataagtgcgtaattccattgggagcctgtttttttgcggggactcttatttcagtgttgtggaagggatgagtgatgggtgttaaggtgcgtatgcgccaggaagaaacgaggtgagaagtgaatatatggtaaagattctggcggtctatgacgctgatcccgcctttggggaacggctggcggattatgtgaatcagaaggaaaagattccgtttacagccatggcattttccagcctggacaggcttatagaatatggggaagagcatcccatagaaatcctgctggtagatgagagttcacgggcgctggtgggagatgtgaaggcagagcaggtcatggtgctgtgtgacggggagctggtggatgggccggatatatttccggccatctacaagtaccagtccggggattgtatcatgcgtgaggtgctggcttcctactgcagccggccagtggagccggcgctggcccttctggggtccagggccctggtagtgggaatatattcccctgtgaaccggtgctttaagtcctcgctggccctgaccatagggcaggtgatggcgaaaaaggagtcggtgctgtatctgaatctggaggaatattcaggatttaccaggctgattaacagtgagtacaaggccgatttatcagatgttctgtatctgtacaggcagggagggtataactggatgaagctaaagtccatgatcagcaactgggggaatatggattttatacctccggtgaggtatgcggaggatttaagccaggtggcgccggaggatatggcgcagctcatagacaggattgcgagggagagcggctatgacaggctggtggtggacgtgggccagatgggaaggggggctcttcctgttctatccatgtgcaatgtggtgtatatgccggtcagggaggactatatctcagccgccaagatagaggagtttgaggagtacctggaggaagcagacgatgccggggtcagggacagaatccagaaactgagactgcccaggcatacaggtattgcgaaacaggaagggtatctggaacagctgatatggggggagatgggggattttgtgcggcagcttttaaacggaaagcagccggagagataaggaatggagggaggaggagtgagaagggagagtcaggaataaagaacagggaaaggaaaaagaaggaaaattgagctatggaagagagggagagtaaaaggaggagccgtgaaggtgtgcggtggctcataagggagcgcattatggaggaactgcaggaaaggcaccatatggacgacggagaactgctggaaatgattgacaggtccataggcgagatggggcaggaaatatttctgcccttaaaggaacggctctggctgcgcggcagcctctttgacagcttccgtcgtctggatatcctgcaggagcttattgacgacagctccgtgtcggaaatcatggtgaatggagcaggaaagatatttatggagagaaacggaagaatggaattatgggacaggaattttgagaggccggaacagctggaggatatcatacagcagattgtaagcagggtcaaccgtgtggtgaatgtgtcctctcctatggtggatgccaggctggaagatggttccagggtccatgtggttctgccgcctgtggctcttgatggtcctgttgttactataaggaaattccctgacccgattaccatggaaaagctgattcgttttaaagctataagtacagaggcagccggctttctggagcagctggtggaggatggatgcaatatgtttatcagcggagggacaaactccggaaaaaccacattcctgaatgcattgtcatccttcataccctccggtgagcgtgtaataaccattgaggattctgctgaattgcagataacacaggttccaaatcttgtgcgtctggagacgagaaacgccaatacggagggagaaggagaaattaccatgagccagctgattaaggcggctctgcgcatgaaccccaatcgcattgtagtgggcgaagtgagggggaaggaggctttggacatgctccaggccatgaacacaggccatcccggaagtctttccacaggtcatgggaacagcccgcgggacatgataagcagactggaaaccatggtgctgatggcggcggaccttccgctggcagcaatcaggagccagattgtgtcggccctggacatcatggtccatctgggccggctgaaggatgggaaaagaagagttttatccattatgagaataggaggtttgcagaatggagaggtggagctggaaccattgtttgaatacgacggtaaggaggaccggctttgtcagaaagggggaaggacacaggcgggacctggttaggcaggaaattgccaggaggaaaccggaaaagaaggttcccagggccaggcctcccgaccgggtggattacagtacctacagacttactgccggagaatggctgttatacggagctctgggggtgggagcctgtgggctggcatcctatgtcttttaccgcagtgtggtggtgttcctgattctgatgcctgttggagcctgttatcctttatacaggagatcgaatttgaagaaggagagggcccggcggctggaactgcagttcaaggagggaattcaggttctgtcctccttcctgagcgcagggtattcattggaaaacggacttacccttagcataaaggagctggaaatactgtttggaaggagggagatgattacagaagaattccggatcctctccgatggaatccggatgaaccgtccggcagaggagctgtttatggattttggccggcgcagcggagtggaggatgtggacaattttgcccaggtcctgtcagcggctaaacgaagcggaggcgagctggtggaaatcatccggcagacagcgggaattatcagggacaaggtacaggtcaaggaggagatacacaccatgcttgcctccaggattttcgaacagagaattatgaatctgataccgttcttgattgtgctctacattgaccttacatcccctggttttttcagcgtgatgtacggtacctggatgggccggagtgtgatgaccatgtgtctggcggcctatgcgggtgcgctggttctggccggtaagatactggacattgaggtgtgaaaggcaggtgaggcggacgataaaggtgagaaaaagaccggcagagaggcttcatgcctggattggccggaagcagatcctttgtcttatggctggccttttcataggaatggcggctcagttgtggcagcgtacagacagtgcgcttttggaaggagataccctggtcaggggaagttatgggcagggggatcagacatacagcctgatagtggaggggcttggggagaaggaggttcctgtggaaatggtcctgtcagaaaggatgtatacaaaacaggaggcacataagacttatgaggttgtgatggtccagcttccgcagctcatacttgggaataatccgtctcttgaggatgtaaggcaggatctgaacctgcttacatatctggacagctatggaataaggctcaggtgggaatcggatgagccggagcttttggattccttcggtgaactgcatgtgcaggagctgaaacagagggggataggcgaacagggaatcaaaatcagcctgcatgtgcgcatgacagaggggaactggccggaggagtatgaactgtctgtgtgcgtaaagccgccggtgcttacgcaacaggaacagacggaggaagcatttgtggaatttcttaagagccaggatgaattgcagtcctacactgcttatatgaagcttccggaggaatatcagggtcagagcctgaaatacagcctgccggaggagtctgtgtttgttcctgtgatgggattgggggtggcaggagctgtattatgttttttcggggaccaggccaggcagcaaaacaggacagaggagagaaaacgccagctggcgctggattaccctgaggtattgtccaggctgaccatttttctcggcgcaggcatgagtatccgcacagcctgggataagattgccctggaatacaaaatgatggtggagcagggaaggcgcaggaaacggtatgtatatgaagaaatgtatgaaaccagctgtcagatgaaggggggagtgccggagggcaaggcatttgaggagtttggacggcggtgcgggcttcagtcttatatgaaactgggaggtctgctggagcagaaccgtaaaaatggttcaaagaatctcaggaatctgctgcgtacagagatgacagatgcatttgaacagagaaaacaccaggccaggcgcctgggagaggaagcagggacaaaactgctgcttcctctgttcattctcttgtccgtggtcatggtcatgatcgctgttccggcactgatggaattcaaataaaatataaggaggagcgtaatgaagttaggaaaggaaatcagggagttctggaaggacgaacagggggtgggagtgattgagctggtgttggtattggtggttcttataggcttggtcattatctttaaaaagcagataaccaccttactccaaaatatttttaaggagataaacagccagtcaaaagaggtgtattaatgtgcaggaaaggtgagattacggtatttctggcaatgatactgttcagtgtctgcgcactgctgtgtgtgattgtggaatcggcccgcacagcaggcgccagatgctatctgcggatggctgtggattcatccgcagactcccttatggcccagtatcaccgggaactgtggaataagtaccggatattggggcttgagtatgacaaggcagagacactggagaaggagttcagggaatttatgaggccctatatggaggctgaaaattggtatcccatgaaggcggagcagattcggataacagatatgacggatcttacccagggggacggaagatattttgaacaggaaatactggattatatgaagtatggtctgttggatgcagattgggacgagctggatgaagccggcgcatcagagctgttggaggcctggaaagagggaaacagtgttaaccgcgtttcagaactatatgccgcccattccagggaagctgtaaaggtggaaaaggcgctggagataatcaacagtacacttctggcccagagggaacggtgggaacaggggaagggctgcctggaccagctggatgggggaggatttgtatcccaggccaataaattgatacgggagctggaacggcttccgggccaggtaaactcctatgaaaagcgggccgatgaattgtatgagaaattggcagacagcagagaacgttttttggaagaagccagtgacctgagtgaggatgtgagggctggcctggaggaggaaatcagccagtatgaggcatatgcggcccaggatggacagcgccgcagggaggttgaggcgctgacaaatctgagccgggacaggatactgtggattagggatgtgattgatatggcggaggcggtaatggagtatatcagcagctgggagccggaggatgaggacgatgagctggacgaggatgccttatggcagccggtaagggcgcgctggtcccagtacggcatgcttacactgggagtggaattcggggtccgggataaggaaaaggaaggttttctggaacaagtaggaaatatggcaggaagagaaatgctggaattagtattaccggagggaaccgttgtttctgggacagccctcaggctttccggcacaccgtccgtccagaggaaaacagacggcggtggatggaaggaaacagaccaggatggagattctaagagcactggctttttgaccggagtcaggacactgatacagcgcctgttgattggagaatatgatattcgtttttttaaagggtttaaaaaagagatgcagaagggggaattttatgagctagaatatatcattcatggaaaggaaaaggacagggacaatttaagcggtgtggcggcgcgcctggttgcatttagagagggactcaatctggtacatattctgtcagatgccggaaaacgccaggaagcgcgtaatctggctctgaccattgtgggagggaccgggattttgccacttgtatcagtggtggcattttttatcatggcagtatgggctctgggagaggctctgctggatgtgcggtaccttctggaagggaaaagggtaccggtctttaagactggatccgactggaaactggatttggccggacttttggagatgggaaggagcggaagcctgattgatgaagaaggaggaaatggaagcggagctgattataagggctatctgcggatacttatattcggcgcttatgacacggatctggtttaccggatgatggatgtaatgcagattgtcactgcggtgaagcagcctggattttctttggcaaactgtgtatgtacggtggatgcagaagctcttgtcagtggaaaacatgtgtttttttcaaatggattgtggaaaagccggggacgggaagacggttacgcatatgacacgcgtatggctgtagccgggagctacctggaagactacaaaagcccataaagacgggaactgtaaatttttaggaatggggaaaggaggttcatgatgatgcccttttttctggtgcagaataaaaaatcaaatccgtattgtccatataaaaaaacagcaaaaataaatacaaccgcacctctccaagtacgtaaatgctgtcgactgttccatggaaaaagggcattatcatggaactcctgccagatgcaggggagtctctccgtagaggctgctctcagtctgtccctgttcctgttcttttgtttctgtctgattatgcctatgaagatgctggaccgtcagagacagatacaggctgtaatggaatccgtgggggaggagctgagtcagtatgcctatgtggaatactgtttccgtagcgcagaggaaggaggtgcagaggtggatgtgggaagagcagaggatacagccacctctgttttggcagcagcttatgcttccgccagaatattgggagagattaacagggagtgggtggaagccgtatcatttgaggggacggacataggggaggatgagatggtccatatcgtgatgagatataggatgcgtcttcccttttccgtattaggagtcagcagcattcccgtggaacaggtatgcagccgcagaatgtggaatggagcagatgggggacgttttggggatggtgacagggatgggaatggagaagaagatgagatagtatacattggaaaaaactccacccgctatcaccgcttaaggacctgccactatctgtacaatgatttaaaggcagtggatttaggggctgtgggggaactgcagaatgaggcaggaggaaggtattcttcctgtgggacatgcggtgggggaagcggaggcacaggaagcgggggcgcgggaagcggcagtatggggagcagcggtacggtttatgtcatgccatatggttcaagctaccatgtgtctaaaagctgccggtccatcattgcgtatgttcaggaggttccattgacgcaggtggaatatctgggggagtgttcttattgcagaggaaagtgatgtgggagacgggggtgttatttgttgggcatattaaatggggatttgacggaacaattaacagcaggacatgacatagccggagtattgctgcgctgcggatttcttatgacgctgtcaattggagcctggcaggatatgaggaatcacaggataaaactcagcctgattgtgatgtccgcagccgcgggcgcggttctgcgatgcatgtatattgtgctggatgcggcaatcatataccgggattcgggacataagataccttcggacttggtgtcgggccagattatagatacagccatggccatggctgtaggagcgggattgctgtttttatcccggataacaaacgaggctgtgggaaagggggatggatggttttttctgatatcgggcatttatctgggtgcattgaaaaatctggttttgctggcaggcggcttggggatttgctttttactatctatggttttagtatttaaagggattatacagggaacagacagggggaggctgcgcattcctcttcttccatttctgatcccggcaggaatcggggtgatgttcctatgagggaaaaaacgcttaagggaagtcttacggttgaggccgcatggattatggccatggtattactgtccatagcggtgatgctccagcaggcatgccgtattcatgatgagaccaaggccgccatgggtctgcatgaggcgttagaaaagggccgtcatggaagtgcaaaagagctggaagcctctgcgtccggggtgcaggaacatttaggccgtctcatgttctttcctgactgcgatctggctataaaggaaaaagggaagaggatatacggagaaggcagagggggaaaatggaaaagagagattgaggcggaaaggttccggccggagacatttctgcgcaagattactttaattgaagggctggttaaagaagatggaaat

SEQ ID NO: 3150 - DNA, 5055 bp, Unknown
  gut microbiota DNA sequence
ctctggctataaaggaaaaagggaagaggatatacggagaaggcagagggggaaaatggaaaagagagattgtggcagaaaggttccggccggagacatttctgcgcaagattactttaattgaagggctggttaaagaagatggaaattagctacaggagagaagcaaaacgcaattacctggtagcgggggtggcagaggccacagctggatatgaagccagaatgctggcccacaacgagattcgtggactgttaaggatgtacataacataccaggatggactgcccttatattgttatgacattacctccagacaaccgttaagccgccttctggaaactcgttttataaccagagaagagatatgccagttattaatccagatacatgcagcgctaagtggtatggaggaatatcttttagatgcagggggtgtcctgctggaaccggaatatatttatgtggagccggaattattccagaccggtttgtgcctgatccctggtgttcaggatgatttccagggtaaactgagccgcctcctgcaatatatactgaagaggataaatcataaagacagggagagcgtagtcctggcttatggactttatcaggaaagccttaaggaaaactgcggaatggatgatttgctggggctgattgcgtcagaacggcggaaagggaagaaacgggagttattgagcgaaccggagggagattacataaagaaaggaggactacaggaaacagatcattgggagaaggggctgaaggagaagggacaagggaaggaacaagggaaagaacaggggaatgagcaaaatagagattgtattacagggaaggggaaaggaaaaagcggggagacagagaaagagcataacagtgacaggggggagaagcggagaaaaaaagaaaagggtaaattggaaaggtgtgaaataaaacaggaaggctcaggccggactgaacctgaatggaaaggaaccactttcagacggcagtttatcgtatggctgtcagcggcagtactttgtccatccgcactgtggatgttcagagggatgacaatggtcattgacaactggaggctgctggcagcaatcgacggaggcttgctgtttatgctgtcagccatgaatctgtataggctgttcattgggcatagggctgcaaaggcagatggggcagcttcagatgatgagcaggacccatggagaattttgtatgaggatgaagatgacgaagacgaggatttaggtaatcagccatccactgcgtatatgaatggggataaaaatgagtatttgcagaaaatgccggaaagcagcgccggagagtgctttcagaccgtgcttttatcagagcggccagcacaaggggaggaagtccggcgtttatctgccctcaatggttcggatgaggacattgtaatatcctattatccatttgtgattggcaaacacaaggatttagcagactatgtgcttttgaaagatacagtcagccgttttcacataagattagacgaggacaatgggagttatactgtaacggaccttaactctaccaatggtaccagggtcaaaggacgattgctggaggcaaacgagacaacgcagctggagccgggagaccagatatttatagctgactgcggatatattttttattaacagcacagagtaacccagtatgtttcgtttatcttaaaagacaattgtgtgagtgtggttgcagaaatagtaaataacagtggggtgggggcataaaaaataactttattgcgtcaaagccacttaacaagtcctttaaagtatgctaagattatatatcattgaggatgtgaggaatacggatggttacgggcataaacaggagcaggccatatgtcaacattgcgctggcagcagtcaacgtattggtatttctgtacctggaggccatcggctccacggaggatggcgtattcatggtaaaacacggggctgtatttgcgccttttgttatccttggtggagagtattacaggctgtttactgccatgttcctgcactttggagtcagccatctggcaaataatatgctggtgcttctggtgcttggagagaagatggaaagggcgctgggtcatatcaagtatttgatattttaccttgccagcggtgttgctgccaacagtatatccctggctgtccaggtacggacagggcaggccagtgtgtccgcgggggcttcaggcgcaatcttcggtgtggtaggcggtctggtctatgtgattgccattcatcatggtcagctggacggactaaccaacaggcagctgggctttatggttctgctgacgctttatcatgggtttacttcagcaggagtggacaatatggctcacatagggggcctgatttccggcttcatattaggtatcctgctttacaggagaaaagatgctgccagaatttccggtatggctggatagaatgcaggctgtgttaaccgcagcggaaggaggattttcagaatgacagatgacaattgtattttttgtaaaatagcaggaggggtgattccgtcaaccactctgtatgaggatgaggattttcgcgtgattctggatttgggaccagcgtccagaggacatgcccttatccttccaaaacagcattttgcagatgtatgcgcactggatggggatatagccgccaaggtacttcctctgggtgccaagattggctctgcgatgaagaaatctcttggatgcgcgggattcaatctggttcagaataatggagaagcagccgggcagactgttttccatttccacatgcatgtgattccaagatatgagggaggtccagacatggtcagctggactccgggaaaggcttcgccggaggaattggcagaggttgcggataaaatcaaaggctgtctgtagttgcaatgaagattgagaagatggatacagaagataaaaaactgtttgaagaaatgtatctggaatatgaggtatacctgagaaggatagcttatgtcaacgatattcctgtagattatattgaggatgtggtacaggatacatttgtttcatatgcccgctataaatattccctggatatgtctgaggaaagtaagagggcgttgctgatacgtattctgaagagccggtgtatggactttcaccgaagaatgaagtacaggagctatggggaattggacgaagaggcatataacagtgaagattatccggcacacgataaggctgccaatctgccggattatgtagtcagcaaagagagatgtcaggcgcttcttaaggaaatcgagaggatgcctgaaaactggcgtcaggtcgcgacgctcagattgatagaaggacggccgacaagggaagtatgcgctatgctgaatattacagaaaaggcatgctattccagagtcagccgtatcaggaaatatcttgaggaactgctaaaaagtgataattggccctaacgttattttacacatgattcaatgagagatacaactgttttaacagcattgttcagattgctctgctccatggcctgtatataggaattgcggtttaggtataaatcgttaatggcatcaaacagggagtcatcagacaatgcttcttcttccagaactttgctgaatccttgttttgcaaaggagttagcattgagaatctggtctccgcggctggccgcggctgacagaggaataagcaggttcggtttgcgcagtgccaggagctcgcagatggaattagcccctgcccttgatatgacaaggtcggctgccgcaaaaagatgctttaagggagcgtcaacgtattcatactgtacatatccggctgttcctatcaggctttcgtccagattgcctttgccacagatatgtattacctgatagctggacagaagcctggggaggatattacggaccgctgtatttacggctacagagcccaaacttccgcctatgacaaggagtacaggtctgccggcagacaggtgggcatacgagagcccggacagccggtcaccctggagtagctctgcacggataggggagcctgtcagtacagccttgtcggatggaaggtacttaagagtctccgggaagttacagcaaaccttaagggcggaaggaatgcagattttattggccaggccaggcgtcatatcggattcgtgtatgatgacagggattttgtagtgtttggcagcaaggaccacgggaactgcaacaaaaccgcccttagaaaagattacatccggtttatggcgttttaagagccgtctggcttccgcgtaacccttgacgacgcggaatgggtcggaaaaattcttgatatcaaagtatctgcgcagcttgccagaggatatgccatcatagggaatgcctgcagtttcaatcagcttgcgttccatgccctggtatgaaccgatatagcggatttcgtaaccagcttcctttaacgaagggagcagggcaagattgggggtaacgtgtccggcagtaccgccgccggttaaaataatttttttcataaaaacctcctaaagtatatgatatgcgggggaaaccggcattcataaacgtctactattatagtaagcattaaacgcaaaaagtcaaccctaaaggcaaagggaactttaggagatttggtaaacagaggtgtcacgtgggagattataaaagagattcagaacaggacaattctatggactgccccatttggggaacggacgatatatcagatgaagaactgttaaaagaattagaagcagtcaagaatatggccgtcccccttcccattccatccccatccccagatgaatttgagaaaatctgggcaaggatacaggaagaaagagctgagtcaaagaatgtaccggaatccgaccaaccggagcaccccaaggttatcaaaccaaggttcggatggaaacggttggctgcggttggtttaattgcctgtcttgtggcagggagtggatgtatggtggctatggggacgaagtcgtatttttatc

SEQ ID NO: 3151 - DNA, 56438 bp, Unknown
  gut microbiota DNA sequence
aatcccctgtaaaataaaggttttactatgggttcgagccccattacttccatttttcgtaccctttttcagtttacgattccatttcatttttctttcatcccccaaagcctgttttttccagcctcctgatttttcccttgcagccttatttgtttccgcggctttgtccagcgggtggaaattatcaattttaagattttcttaataatctattcaaagaacattcaaacattccggaggattgcatgctatactaagtacataagaaatgcacgaatgtttaacaactatccttcaaccctttttgaaaatccgaaaatcctaaagaaaattgctccgtaccacctggtacggagctttttctatgaattccataatgtttgactttctctatctccggtacctatctccggttcagccctgccagaacttccctcaatttctccacatttccatcatcaaaacaatatccgtccatcccgcagcggcgcgctccctctatgttaagctcaaggtcatccacaaagaagcattcttcaggcttcagatggaaccgctcaaagaggtggccgtatatttccttctgtggcttcagacacaggacgtcggccgagaacaggatgccgtcaaaacagtccactgcgggcagcacgtccttatagcagctcaaaaggcgtacagatgcattggagcacagatagatgccgtagcccatggacttaagccatcttaccacatcctccattccttccttcttatacatgttgaactcatgccagcggttgaaacacagggcggccagactgcgctcctcctctgtatccaggcgggcctgcatcttttttaaggccatatcctccggcattactcccaagtccagcagaatccactcaggagatacgaatatggaagtgctgacctttttcctggtctcctggtcctctatgaaatgcctgcacactccgtccgctatgtagtccaccaggacatttcccatatcaaaaacaatgttcttaatcatcctatcctcctgctctctttcatatatgatggctttgcagcctccaaggggaacatttcaccatattcaaaaacccgggacaaggccccgggtttcacgtctcttaggcttccggtttttcaacctggataatggcagccttctgcataggaatacggcagttcttattgttaccgaattccacaatgactgtatcatctgtcatgtcgatgataacgccatagaatccgctgctggtgagaatggtatcaccaactgcaacgctttccagcaattccttctgtctttgcttctccttcttctgaggacggattgccatgaaatataacatacctcccagaagaacaatatagagaacccagaacatcggaccacttgtcattccattttcctccttcacacctaccgccgcctcgccgcagtagtttcttattcatcagacgccgtactgatcgcacggccggaaccttccataccggcaagcttggccgctttatactcagcataacggtgttcctcgatggcgtcgcgaatctctttcatcattgtattataaaaatacaaattatgcaaggtacataatctcattccaagcatttcttttgccttcagcagatggcgtatataggccctgctgtatgaacggcaggcaggacagccgcatccttcttctatgggacgggaatccagctcgtatttctggttaaacagattcagcttgccctggttggtgtacacatggccgtggcgtccgttcctggatggatatacgcagtcaaagaagtccacgccccggtcaaccgcttccaggatattggccggagttcccacgcccatcagatatacaggcttgtcctcaggcaggcagggcactgtcacatccagaatatgatacatctcctcgtggctctcgcccaccgccagtccgcccactgcatagccgtccaagtccatttcccgtatagtccttgcatgctccatacgtatctcatccaccacgccgccctggttgatgccgaacagcagctgctgacggttcaccgtgtccggcagggagttaagacgctccatctcggtcttgcagcgcgccagccagcgggtggtgcgctccactgaatgccggatgtagtcgtcgcttgcatggctgggagggcattcgtcaaacgccatggcaatggtggaacccagattggactgaatctgcatgctttcctcaggccccatgaatatcttgtggccgtcgatatgggaattaaagtaaaccccttcttccttaatcttgcgcagtcctgccagggaaaatacctggaacccgccggaatccgtaaggatagggcggtcccagttcatgaacctgtgcagcccgccaaattcccttatgagcttgtcgccggtgcgcacatggagatgataggtattggacagctccacctgggtgcctatttcccgcagatcatccgttgatacagctcccttgatggcgcccactgttcccacattcatgaacacaggcgtctccacggtaccgtgtactgtttccatacgggcgcgcttggcacgcccgtcctttgttatgacttgatatttcatatgatatgcctcaattattcctcatcgtctgccagagcagctttaatcatgatggcgcactcaatccgcttcttctgcatctcacagccaatgtcatatgccccgttgatggatccgctgaagttatacgcgttggcagaacagccgccgctgcagtagaacctggcaaagcagtccttgcaccccggcttggcgtatacattgcaggtcttgaactcatccctgatatccgtgttcacaacacctgtgtccacattgcccataaggaatttttcattgcccacaaactggtggcagggatagagatcgccccagggggtcaccgccagatactcagtgccggaaccgcagcctgccatgcgcttggccacgcagggtcctgcctttaagtccagcataaaatggaagaagttgaatccccttccctcctttttacgcttgatatactccagggccaggcggtcgtattcctttaagatggccgggatatcttcctccttgatggcgtaatcctctgacgggtcagccaccaccggctccatagacatctgctcaaaccccagatccgcataatggagcacgtcgtctgcaaagtccagattgttcctggtgaatgtaccgcggacataataattcatctgcttcctgctgtccgcaaacttctggaacttggggacaatcaggtcatagctgccgctgccgttacggaaggggcgcatcttatcgttgacatcccttcgtccgtccaggctcagcaccacattgctcatctcacggttgcagaattccattacctcgtcatttagcagaacaccgttggttgtcagggtaaaacggaatttcttgtggtgggcttcctcctgggaacggccgtattccaccagccgtttcaccacatcccagttcatcaggggctcgccgccaaagaagtccacctccaggtgctccctgtttccggaattggcaatcaggaaatccagtgccttctttcccacctcatagctcatgagggcgcggcgtccatgatactcgccttcctctgcaaagcagtaacggcaggccagattgcagtcatgggcaatgtgcaggcacagtgccttcaccaccgtcttcctcttcttaaagtctaccacaaaatccctgtaaatatccttggtaaggagctgctctgcttcaatcagctgaccgatttcatccagcgcctcctctatatcctcctggctgtatctgtccttcagacagacccttacctcttccttcacatctgaaggcagggcagcgggcgcttccatctccggaatccgctgtgaaaccagctgcacggcgtcgtagaccaccgggtccaccacatggacggatccgctgttgacatccaggacaatatgataaccattatttatatactgatgaatcacgaatttactctctctttccaagggccagtggccccaaatcctgtgcatggtaaagcccctataatcccatcgaccataggggcttgcaaccaatttcctgtatgtatctcttctgaccggcgattagcggttagcgttttcgcagctctggtttcctactgtacaggatgtcttgcaggctgactggcaggaagtctggcactcgccgcatccgcccttcttcattgtgtcctttaaggtattggtattcaatgtcttaacgtgcttcatactacggcacctcctattcatttaatattattaattatttgaaactataattccttgaaattataacacaggttaaagtcccttgcaacggtattttcaaaggtttgtcatattaaaggctcccccgggaatatactgcaacatagattctttcaaaaggagaacaatatatggaaaatggtattgtgaagcccatgctccgctccctgctcatctcctatgtgctgtcaggaatccttctggctgccctggcctttgccctctataaactgcgcctgaaagagggacaggtgaacctgatggtgtatgccgtgtatcttttgacctgcttatgcggcggttttctggcgggcaaacgcatccggcagcgccggttcttctgggggcttctgtcagggcttctgtacttcctggtgctttttgcagtgtcctgggccatgaatatggggtcagccattgatatggagcggtctgtcaccgtcatgggcatatgcgcgctgggaggaaccataggggggatgctcagttaatgttcaaaagagagaatacctgattccagtcatggccatggaatccggtcattctctcttctcttccatcagatgccctttgccgggccttattttttcttatttctttttcttcttcacacccgcgtcttccaggctccccacagcctgtgccagcacaaagacagcacttcccaaaaacacgaacatgtcgcccagattgaacaccaccttcttaaggaatttccattcaatggtgaagtaatccaccacatacccgcgcaccacacggtcgtacagattgctgagagcgcctcccatcacaagagacaggcccagcttctccccggtctttcccttatcctgcatcatggctgccagtgctccggccatggccgaaatcaccataagcggaatcccctttaccaattccggtctttccttcataaatccgaagggaaaaccgctgttgtggttcttatgaagctttataaatcctttggcagacggcaggtcccttggaaacgtgtcgtcctcctgaccttccaccacgctcttgacccccaggtccagggcagccagcccgcctattatccagccataaatcatagattcgccttcctttccacccttttatttcattttactatggtttcacacctccgtccagtgaaaggtttctgaattcaagcatatactataacaaatatcctgcccgaggtgtgccatggcagactgcccatttaattccgccgacgagaatattgctgatttcatatacagaattggaagccagcagcagatagtcggcaatccggccgatattccctgtatggattatgtgaacgatgaatacaatatcatctacactcctctggataccgtaacccccatttccctggcccgatacagctactatactgtacccggacttttttcccttctggacagttccagcatggaggcctccggcatacttaccacctttgccgcgcctgccctgggaaacagggggcgcggaaccctaataggtatcgtggataccggcattgactataccaaccccttattccgctatcaggacggctccacccgaatcgccggactgtgggaccagagcatccccacaggagaggatgtcattcctcccggcgtgccggcctattatgaactcagcggcgcctcttatggcactgaatttaccagggagcaaatcaaccaggcccttgcctccgacagccccctggacctggtgccctccacagacaccaatggccacggtaccttcctggccggtattgccgccggcggctccctgccggaacaggacttcactggcgcggctccggaatgcgagatcatagtggtcaaactgaaacaggcaaaacgctatctccgcgaattctaccttgtcagccaggacgcagatgcttatcaggaaaatgacatcatgatgggaattaaatacctgagggtgaccgcattccgcctgggacgccccctcatcatcctcatagcccttggctccaaccttggaagccatgaaggtacctcacccttaagcagcgttgtacaggatgccagccgtttcctgggccgggcagcggtcatcgcggcaggcaatgagacaggccgggcccatcaccatttcggcaccattccgtccggacaggagtgggatgatgtggaaatccgggtgggaccggaggaatccgcccgcggtttttccctggagctctgggcatccactgccgatacctactctgtgggctttgtctcccccagcggcgagataatctcccgtattcctattatagccaggaacgagacctctatcccttttcttctggaaccaacggtcattacggtcaattaccagctcattgaatccggcgccggaaaacagctgatattcatgcgttttagaaatcctgtggccggcatatggaaggtgcgggtctataatacccaatattttacaggagaattccatatgtggctgccctccgagggactggtatcggatgagaccgtatttctgcgtcccactcccgacaccaccattaccctgcccggcaatacggccgcgcccattacagtgggggcctataaccacctaaacaacagtatttacatccactccagccgcggcttcaccccttccggtattgtaaagccggagctggcagctccaggcgtcaatgtaatggggccttctgtaggccgcagagctggcggatccgtacccatgaccacccgcagcggcacctcagtggctgccgcccacgtggccggcgccgtagccagcctctttggctggggaatcgtggagagcaaccagattaccatgagccaggcgtccgtgaaatcttatttgatccggggtgcaagaagaaatccagcactccgctaccccaacgaagaatggggctacggagcactggatttatatgaaaccttccggcgtatcagggaataaccctctgttcagtaaggtaaatgagccatgcaaaggtatgaattatccacgcatctgtatcaatggtccgccgcttttttccagatagggacgggtgacaacaacagagccgatattagggtccttgggaatctcatacatgatatccagcatgaattcctccagaatggccctcagcgccctggccccggtccctctcttgatggcttcaccggcaatccatttaagggcctcatcctcaaagaccagccgcacctcatccatctccagcagacgctcatactgcttggtgatggcattcttcggctctttcaggatgcggaccatcatatcctccgtaagcccctgaagggttactgtcacaggaagccttcccagaaactcaggaatcattccaaaggtccgcaaatcctcattggtcacctgccccagaatatcgggatccttatcatatgtatccttcagtatagaaccaaagcccatggtggttttcttcatcaggcgctccttaatgatttcctccaaatcggggaaggcgccgccgcagatgaacaggatattatccgtattcactgttgccatgggtgtcatggcgtttttctggttggagcctaccggcacctccacagtgcttccctccagcagcttgagcagctcctgctgtacggattcgccgcttacatctctggtattggtctgtttcttcttggcaatcttgtcaatctcatcaatgaatatgattcccctctgagcccgctccacatcgttatccgcagcagccagaagcttggacaccacgctttctatatcatcgccgatataaccggcctctgtcagggaggtggcgtcggcaatggccagcggtacatccagaagtctggccagcgtcttaaccagataggtctttccgcttcccgttggaccaatcatcagtatgttggacttttcaatgacaatgttcttatctgttccggcatcctcccctgccccgtcctgaggcggctggtccagaaatgcccttttataatggttatatacagccactgccattaccttcttggccttttcctggccgataacatattcgtccagctctgccttgatgacatggggcgccggtatatccttcatagtcaggaccggctgttccttggcttttttcttgattttctgctttttggggatttccactgcgggaggcgtcatgttcaggtcattgaggttcatgttcatatagggcatattgggcagtttggaaaaatccatgcccccctttgtcacggaatcaaatgctttctgcatacagtcatggcagagattcatgccgccgggcatggatatcatggggccggccttgctctcaggccgccggcacatgtaacacaccttttcatagcggtcttcttccttttgtttgtctttatcttcaccatggccggatgtctccacatcctgggtatactctttctcgtccaagtcagttctcctctctgttaaagggcgtaccgggccgttccatcgtcccgccgcttaacgtaaagtatataacaaaatgcttccccaaacaagaggaagcattttcatttcacattgttttgaaaaattttagttattgggcctgtgtttccgtattctcctggggcatggccttcagcgtgatggtgaccgtcctttcctggtattccccgtccttctgggactgtaccgtcagatcaatctgttctcccatctcgtagcaggccagaagctcctgcaaatccgtcatgttccggacgctctgtccgtccaccctggtgatgatgtccttttccctcaggtcagactgggccgcggctccttcctccagtatcttgtatacatacacacctcttggcattccgaaggccgctgcggactcttcatccacgctggttccctgtatgcccagatagcctcttttggcctcctccaccggattcatggtcttgcggttcataagctggttcatgatgtcctctgccttggatatgggaattgcatagccgattccctctacctcggtggaggaatacttggcggcattgattcctatcacctctcccttcatattaagaagggctcctccgctgttgccgggattgatggccgcatctgtctgcagaagttccctggtactggtatttgataccctgacctcccggttaagggcgcttacataccccacggtcacggactggccgtagcccagcgcattcccaatggctacaacgccctgtcccaccttcagttcatcggagttgcccagcctggccaccttaatcttgctcttggtatcgtccttaatctgctccaggggcactgctatgactgccaggtccgtttctgcgtccgttcccttgatggctgcgtccactacctcactgtcaataaaggccaccttcagggaggtggaatcctccaccacatggttattggtcacgatgagaagttccttgtcattctcacccactatgattcccgaaccgctgctgggtacctcataggtctgggggccgcccctgaagaaccagccgtatccgtaattattgctctggtataccgccgtgctggtaattgccaccactgtgggcatggcctgttccacaatatcggacacatccgccactgcctttccattgttcctctggccctgctggtatccgccgttaccctgggcgctgccctggccgttatcctgtccgctgccctgactttctgtctgggcctttgatatctcttcctttttttccgcttcagccgatgcagccgcgctgtttcccatgaatctggatgcagccacattgacccccaccatggtcgcccctgagacagtgccaaagagaagggcacccgctgtaatcagggctgctttttttaaaatgccgccttttttcttctttgggggcatctcctccggctggggacggcgcccgtatgggtccccgccgtactgcctgttgtcataactctggttatcataagacttccacccgtagttctggtcgttgtcgtacattataattcccctttctcacgctttctcacgtaatctcccgattctgtacacagtttagcaacgatttgtgataaatgtgtgaccattttattatataagactaaaaagtgccggcagggaatgacatatccctgccggcacttttacagtctttatatctgctgcttttatacgaacaatcctgacattaatttcccggcccgatgatcacagaccccggtccctccggcacgtattcctcggacgaggcgcccggataagctgccgtacttcccttggtgctgccagggtaagctgcggtgctccccttggtgctgccaggataagccggggacgttccctggcttccgggatacgcagccgtggtccccttagaggcgcccggataagctgcgctggttcccctggtggggtcctgacccggataggtgattgcgcctggtccggttgtctggtcgccctctgaggtctcggcccccgggaatatgctgcctgagctgctctctcccggccggccgggatggacggtaccggatccgctgctctcccccggccttccgaatatatcatcctcaggcggatccagttcattgccgaactcgtcggtctctatctccaaatccgtctcgccgtcaataatggactcatctgtcccggacgtgctgctctcagactcattttcttttgtctcttccgttgccttggtcgcctgagtgggcttggggatataccctccgtctgttcccacatggtcgattggcttggcttcattgtacatgcctgtatccgctgatattttggcactgatcttctttaccatatcactgggctggtaattttcatccccaaacaggaactggtggagaagggttacattgctctccagtgtctggggaatgacgcaggcgcccttcttgcccatattggcatcgcttctggctgccgggaatcccatggtatccgctatggtatacttggtcagatttctggctgccggtataatgtcatcaatggtaacgctggaaagaatctgggggaacactgcctccatgacattgtttaccaccgcaaagtcggatttcttgagtttctggaaacataggtctatgatttcccgctggcgctctgtcctggcaaagtctgtatccatcttacgaagccttgcatacgcaactgcctggacaccgtccagatggttgagccccgcctgttttaactgataggaacctactccggtagcctccacagtctccgtaatataggcattgatatagtaaaattccgccttgctcagctccacatccactccgcccagaatattgaccgcatccaccactgctttccagttaaatgtggcaaaatcatctatctgcaggtccaggtttctgttcagcgcctccactgcctgctcaggacctcccaggaaataagcctgattgatcttattgtacagcccgttgtcgcttacactgagatatgtgtccctgaacacgctgacaagcttaatctcgccggtgccctggtcaatgttacatatgatgataacatcggcgttattgccttttcccaccgagttattccggctgtccacaccaaagagggcaatggtccagtatccctccatctcctccaccttcctctgagggatattagggttagtcacctgggccggtttaaactggcttggctgaatcagactcatcttattctgcgcataccggtaaagcccggttcccaaaaggaataagatttccagtatgatgaatacaattatcaacttacggcggcgcttgatctctgctgctgccggatccgctgccgccgcttccctggctgccctgcggcctcctgctccgcccccgttccttccgaaagacgaatccctgcccttaccggcgccaaggtcttccgccccggcataggaccggctgtatgtgcggctgccagtctcaccagcccccaaattcccggctgccgtcctggtaccttttccttcacctgtataccttggccgttctcccggcctgcttcctgagactcccggccttccgtcaggccggtcccctgtgaatctggggcgttcaccgctcctgccgcccgcgcctgtatatccggggcgttcaccggtcttgctgcccccgcctgtatatccggggcgctcaccggtcttgctgcccgtgcctgtatatccggggtgttcaccggtcttgctgcctgtgcccgtatatacggggcgttcaccggatccgctgcctgtgcccgtgtatccgggacgcgctccgcccttgccgcctgtgcctgtgtatccggggcgctcaccggcccctccggccgtgcctccgggacggcccgccggcttctctcctgcaaaacgcggacgctggcctgtctttccctcaccgcttacagggcgttccggcatcctctcacctgcataggtgcttcgcattccgccgttctttcctggtatgcccggggtacgctctgcgtctcccactccggcatagcgcggacgggcgccggaaccggagctgggcccggcagccgaacctgagccgcggccatctgatgcagtccttactgacgccctgccggcagataccggcgttccctgcctggatccgcctcccgaacctgcgcggcccgcctgtccggcgccccttatctcctgcccgctgcctccggtacgcccgcggggcattgtatctgaatcagccccggcaccggcgcccaaatcgcgcttcctgctgcggcttcttaatctctcttcttcctcatcaaatccattgtcaaactcacgattcattcgtccatcctcattccatcacgtaaaccaggcgctaatcattcataagcagccccgctcccctgacccgcagactgtatccgggcacggctaaaacgcaggagcattcttaacgcaaacgtcatgcatatcaatatgcatttttattaataaatcccttgaaaacagtgagaaacataatcttgaagtcaaaacccagactccagttctcaatgtaataaaggtcatgctcaatcctcttggtaattgatgtatccccgcggtagccattgacctgggcccagcccgtgagtcccggacgcacctgatgcttaatcatataccgcggtatctcttctttaaatttttccacaaacagcggccgctccggccggggccccaccagactcatatcaccaatgaggacattaaaaaactggggcatctcgtcaatgcttgtcttgcgtatgaaacgtcccacaggcgttaccctgggatcatggggcgttgtccactggctgcgctccctgcccgggtcctgaacctccatggaacggaacttgtacatcttaaagggacggttgtgcagccctatcctctcctggctgaaaagcacgggccctggtgaagtgattttgatgagcagagccgtaaccagcatgagaggcgaaaatacaatcagaccaaacagagcgccggctaaatccactatccgtttcatggtggcgttaaacaccccggtaaggggcacatggcggatgtggattaccggaagtccctgaaggtcttccatatagggaatcgtcggtattatgttattataatccggtatgaactttgtatgcacgcctgatttctcgcaggcagccacaatctgttccagattagagtactctttgatgctcagggtaatggctatttcgtccagcgtattggacgccaggaaatcctccagatgattggtgggtcccagcacctgtacctttttatatgcaaagccggccggccggtggtcatccaggattccctggacatggtaaccccattccggattgacgctgaccctgtcgatgaacccttcggccgcccggctgtagccaataaggagcacatgcttctgattatagccgttggtccgcagggagcgcaggaagatgcgtattgatatccgctctgcttccagcaggatgatattggccgcaaagaatgccagaatcatctttgtggagaaatagctcagatggcttacgaaccttcgcaggccaaaaagcacgaacgtaaagagcataaggccgatgacattggccttgcagatattggccagttccgaacgccgcccctgaatccgtttgggcacatacagatggaaactggcatatagaatcaggtatatgggcacgataaaaatgagcgccataaaatatacctggggctttagcacgccttcgtctaagggcagtacctttccgctgatgacaatgaaccatgccagagcataggccaccacagtgaccagtatatccagcaggacatgcatgcggttcagccttttctggttatcttttatcattgtatttcaccttggtttctcaggaaatcccttcttaccgtaaatatcgttgttattatacatgataagccgtcattattctataacatttctcttaatttcgaaaaagttcataatttagcaatctgccttgcggcaaactcataaacatagataagggtccctgtaatcaattcccattcaatggccagataatttttaagccgttccctgctgtaaggcaccttccggcaccttttagcggttgccaggccttccttcacgccagccgcataatcccttccaaatccctttttcttaaaaaacatgtatttaagtcccattcccaggagaatcggaaccaggttcaccgccagctgcaaaaggggcatgtttttataattcagataaatattattcctggcagccagctttaccttgaagggattgtacttggaaccgctggtgccgcttcccacatgataaaccatggccgtgggacagtagatgttgtcatatcccgcaattctggccctgtagccaacgtccaaatcctccagatatgcaaaatgcatctcgtcaaagtatccgatttcatcaaacacctccctgcggtagatggctgccccggcgcaggccgagaagatgcggcaggccctgttatattttgcggatgagcgtcccacccctctctggtatgcccagcccaacagactgtacatatccccggcatcgtccatcagctccttgcggaagagctgaatcatcttgcagctgacggaaaatatctttggggagcgctcaatggccttaatcatttctcccacatagtggaagtccggctccgtgtcattgttgagcagaatcacatagggagtcgccgccgccttaaggcccacattcaccgcgcctgagaacccggtgttctccggcaggaaaatggccggaatctcttgctccttcagccactccacgcttccgtctgtggaaccgttgtccaccaccaggatgtcaaaatcccggcaaatctgcatgctaagagctttgaaacagggttccataaacttaagcccgttataattgggtatgacgatggttacctttctgcgcctgcctgtccttcggccggtttcattgccacgtcccgcttcattgccgcatcctgctttataatcgcatcccgcttcattgccgcatcccgctttataatcgcattctgcttcataatcatttctatggtcactcatgtgctttcgtatcgtcctccggcgcaaactgttcgtaaaccttaaggtcataaggctcacctattttttccttcagaaggtccctgagcgcgaaattagatttgcgcagcgtcaggttggggttgtagcaggggtcgccattttgaatgatatcaggccacttccgtatgaaaatggctacctcccggttaaagcgggctatcttttcaggcgtatcctccagtcctctggacttggattcatagtggtaaaagcatgaataaggcgcatacactaccattttccccagggcgcgtactttcatgcagtaatcaatgtcattaaaggccactgccagctccgggctcaaacctcccacctggtcaaagacggatttctttgtcatgaggcaggccgccgtgacggcgctgtagtcctgggcgcacatggctctgtggaaatagctgttctcggccttatgaagtccgataaatgtatggcccgcaatgccgccaaagcctatgaccactccggcgtgctgtatggtgtcatccccatagagaagtctggctcctgcaatgcccacatcctccctctggcagaatcccagcatttcctttatactgtcctcttcaatcagctccgtgtcattgttgagcagcagcaggtattcaccctttgcaaaggaggctccgtaattattgatggctgaatagttgaagccctccttccaggtaaccacccggaaattggtgtgctccgcctgcatcttatcatagtaggcgaaggtttccttctgggaactgttattttccacgataatgaattccaggttccggtatgacgatttctccatcagggaccgcacgcacacatccaggtcctggctgtggtccttgttggggatgataacagacaccagaggttccccctgtatctcaaaggtggtatggtaaatgccgtaatccacgcccttctccaccttcaccgccggaattcccatacgctcatagtgggccatgatggctctggatccggcctcaaaggcatacatcttgctctccgggttgctggccgtggaattctgatggcagcgccagtgatagaggacctttggaatatggtataccctctttgccgcctccgtacaccggaaaatgaaatcataatcctgggcgccgtcaaactcctggcggaatccgcccacctgctttaacaaatcctgccttatgacgaacagatggcatatataattgacgctggtcagcaaatccgggttgaaatccggtttgaaatgagggtcaaacagggcctttccatccatgtccagcttatcttcatcagaataaataacctggcagtccggattttcattgattgccttcacgacctcataaaaagcattgggaggaagcgtatcgtcatgatcggccaggatgacaaagtctcccctggccatatccagggctgcattggtattgcctgagattccgcggttgctgcccagaatctcatagcgcacacgccggtcacggtccgcgtacttcttaagcacgcgctccagcccctcacccctgggacttccgtctgcaacacatatctcccagtttgtataggtctgttccatgatagagtccagcatttccctgagatagcgctccggggtcttataggcgggaattacaacagacagcatgggctcaaagtcaaataaatgctttctctgctccgccagctcctcgtccgttggtttggtcagctcataccactcgctgtaatcataatcattgtcaattccctgcagcttgtgctttgacttgaccacaagggccttaaggccatgctccttccaaaaatccatggccacatggactgtctccatgttcatcaggtccttaagcttctccatgcgcttgtgggccacgctggcccgcctggcaatcagttcctcattgtacttgatttttgcctggcgtccctcacagcggatcagcaggtaataatccttcccccgctcatagggaaactggatgtcaaatccaaattcccggtcatagaccttcttaaaatatatctggctcacatcatccctgcgggtatttacatgcttaaattttaccggctggcgcttctcatcctccacccggaaggtggccttgctgtcaggggatttacctatagcccatccgttaagggtaatggaattctcccggatgcgtaccacgtctatcttatatttcatgcttcattaccgccctttttctcttcctcgttaaaattaatacgctcttcctcaataaccaggggccgcttcatcacccgctggttaatactcatgatatactctcccagaaaaccgatgaagaacagctgtaccgaccccaaaaacagcattccgatcagcatgggcgccatgcctgccgggaaacggtcccaccaaatcagcttcattaccaggtagaccatggcgatgagcatgctgacaacagcgcatatgctgccgaaaatcgtagccagacgcaggcctgcttttgtataggaagtaacgctgagcatggcggcgtcatacagacgataaaagttattatgggtcttgcccgccctgcggcgcggctgctcatagggaatctccttgcggcggtatcccagctcagccacgattcccctgaggaaaggagtggggtcatccaggttgcgtaagacctcgatgaactccctgtcatagagaccggaaccggtaaaatgctcaatctgctccacatccgacaatttcttgatggtcttgtaatagcagcttctgagccagtacatcagacggttttccttgctgctggtcttgatgccgataacgattttatatcccttctcccactcatggatgtatttaggtatcatttccacagggtcctggaaatccgccaccatctcaatgacgcagtctccggtgacctggagcattccgtaatagggggaattgaactggccgaaattccgggcattgagtatggccttgatgcgcgggttgtccgcgcacaggccccggatgatatccctggtgccgtctgtggaatcattatcaatgaataccagctcatagtcatactgcggcagctctttttccaggatttccgtcactgccctgctgatagggcctacattttccgcttcattataacagggaatcaatacgctgattttcttcatatctctctatgcttcttctttctctatggtttcttcgatgccttggcggaaggtatagcgctcctgccatctgccgcctgtgagtctcttaagtctggtaatgtcaggccggatggacagggcgccctctttggcctgtacaaaggtcccgtactccagcgttcccttaaatcctacgatatcatggatttcctcaacaaaggaccggaggggcctggtatcctggctggctatgttgacaatagcgcttatgggactgcgcaaattgtccttttttaaaccaggttcttcatttacggcctgcctgtataattcatatactgcctgtaccgcatcctcaatatacataaaattccacatatgcctgcacgcgctcagggaaaccttcttatcctgccttaaatcccgcaccagggtggatatgatggaccacggatgatccccgcagccatacacactgaaaaatctcagatggtaatagtgaaggcccagacggctgcaaaggggagctgccttctggtaaaactcccattttgcctttccgtattcattgatgggacggcagggcgcttcctcttccatgattccgtcaacagccccgtattccactctggaaccagcgtccatgaatacccggcatcccagacgtccggctgcctccacacagtccagggagcctgccacattgcgggcctgaacctccggcgagtctatctcctcccggttcacacctccccaggccatatggaaaaagccgtctgcatgtcccacctcagggacgcattccaaaacatgggccaggtcgcaggccactgtatgcagtctctcatgaacaggaagggcgtccagatgaagggaacccggacgcaccagggcgtacacatgggccccctgctccagaaacaccctggccagattgcttccgataaaaccggttgctccggtaattactacgcgcatgttatcatccctcctaaaccatctccagatggttggaacgcatggccctgatttccacggcggtcccgaacttctggcgtatgcttgccgctatctcatccgtataaccgggggccgtgattatgatggcatccaccgggtgttcatggaaatggtccggtccaacgatgggaagatgggacgcgggggcaaactttccctgcttaaagggtgcggaatctatgatataccttgccttttcccccagcttggtagtggctgcaagggtaaagccctggtggctggctccccagatggccaccttcttatcccaggcatccagatacttcatataagtctccatctcccgtttcaaattcacataacactccagcaggttctccgtatccatctgcggacgcttccttacaataacggaaagggtgtccctgttgataacctcgcactcttctacctggaacccgttgcgctccagaaggggggtaagggtctcaaaggtgtagtaggccagatggtcccgtatcagttcataatagctgttgtggtccatgatatattcaaagcttgggactgtgataagccccatggcatcgtcctccaggttgcggtatatggcctgaagcatggtgctgggatccggctggtgctccaggaaattaaaggacaggaatacgtcatacagcccgccggcaaaccgcgtatcctctgtctccgtaaacccttccgtcacatccagcccctgggcccttgccagctccaccaggtggggatcatgctctatgccgtggacctccaccggaaattccgacagaacctttaagaattctccctggccgcaccccacttcgatgaatttctttccctccagatgatagctgtcaatgagatgcttatactggtatctgcgcagctccaccatggtctttgaaaagccgccggcccgaattacatcccggtaatagtccaccggctcacagtcaaactggaccagtccgcagcccatgcactggcataaatccagggtcagtccccggtcctcctttaccccctgtgcatccggcatgtgctgggccgaggcaggcatattatctaacgtaagcagcggcgtctcccataacggggcgccgcaggcgatgcatcgtttcatagacaattctccttatataatccaatcatttccctgattccgtcctcaaacgaaatctcctgggcgaatcctgctgcttccttaagcttcctgatatccggcaccagggataccactccctctgcattgggcggccgttttccatattcataggtgcccttttcaccgcaaagccggtgcatctgttcaatgtacgacttaagggggcgggtgtcttctcctgccacattatacacgccggccggtactttggcaagcagaagccctgtcagggccctggccgcatccctcacatgaaggaaattccactgctgggtacatgccccaagctccatcctgcctcctttaagaaaggtattgagacaggtggacaccagggaccagggatggtctccgggaccgtaaacgctgaatatcctggcatggatataatcaatccccagggcctttgcctcttcccctgccctgcggcatacctccagcttgtcctttccgtattcagagacaggatggcacaaaatctcctcgcccataacgccgtccgcaatgccgtactcggcctgggagccgcaaaaaagaaacctgacgcaccccagacgggctgccgtgtgaagggaatccagggcatacccgatgttgcgggcctggacatgagggtcctggcggttggcgctgccggccccctcccagcccagatgaagccacaggtctgcctttgttttgaggtcagaacgggattttaaaaccggacaggagaccagttccgggcaggcatccagcttaccgatgtcctttagggcaaagggaaggacggtaatgcgccccccttcttttccagctttttttccggccttattgcctgtctcttccccagtctcttcttctgccttttccccggcttccgccccgggctgttcaagccggcctcgccccggagagtccggccttaccacggcaaatacatgatggcctccggccagcagctcttttgtaacagcctttccgataaaactggtagctcctgttacgattacacgcataacatatactccttcttatcccggatcccccgcggcaggcctgtcctttggtctgctggcaggtctatcccttgatcctgggaataatcatattttcatccatctcctcatccggcaggaagggcgacaggtcctccaggggcggcgacaccatggtgccgtccggcagtctcttggcggatgacttgggttcaaagttctggtccatagacacgaatacctcgcagatagcaggtccctctgccgccagggttttctccacagcctcccccagctcgctgttgtgccttgctgacacgtaggggtagccgtaggccgccgccagcttatccagagccgggaagctcaaatccccgctgtccacgccgattccaatcagcggctccccaaagaaattcttctgggtctggcggatggaatggtatcccccgttgttaatcacaaatatcttgatccccattctgtggtggatgatggtctgcagctcctgaagattcatctgcatgcttccgtcccctgtcaccaggatcaggtcctccccgcttctgtccccgccctggctgtagcagcccttatccctggaagcggtccaggcgcctatggctgccggcaggtcatatcccatggaggcaatggcggaattggtgatgaaacgctggcccttcttaatgatataggcgtgtccccccaccacacaggcagagccattgcccaccaccgtcacctgcccctctctcaggcggctgctgacagcatggataaacgcgtacacattggccggttcctcatccgtatgggcaaagtgcttgggcagtataacaggatatttctccttccacatggcgcaggttctgctccatgtcatatccctgaggccctttcctccgtcaaacacctgtctgctgcctggacggctgacgctctcagggagatttccctcttcctctgccaaaacgcggtccagaaccaggtccagctgttccagaagatcctttgcatcggcatggacccgcatgtcgctgtggactgacggcttcttcagctcttcctcatctatatcattgacaatcacataagcctccctggcccatgtctcaaagttatatcccacctgccggatactcagacggcttccaatggagagcaccaggtcgctgttttgaatggcaaaattcccaggcctgtcccccatattgcctgcacggcccacgtacagggggtgggtgtcatacatgatatcttcgctgtcccagcccgtaatcacgggaacgcccagcttttcggccacatccatgaacaaatcatgggctcccgctatgcggattccgttgcccgcattgatgacagggcgctttgcagcccttatcttatctataatagtccgggcggctgaaacctccaccttgcccggcagtacctggcggtgttctccctttcccgcctcgtcctccggtatcccgtgtcccccgtcctttccggcccagccgtttcctccggcctcgtagtcagccgcgttaaagccaggaagctcctctgtctccacaaaggcgccctgtacattcaggggaatatccagccagcaggggcccggacgcccggaccgggccaggtaaagggccttctccagacagtacctgatcctcatgggatcaatgaccatctccgaatactttgtcatacagtcaatggctttacagatatcaaactcctggtcgcccatggcgcggatgcccacaccggaccacctggccgttgtatcatagcgcacctgccccgacagtaccagcatgggaatggaatccagccatccccccaccacaccggtaattgcattggttcctcccggaccggtggtgacgcacagcgccgcgatgcggttgtgaatcctggcataagcctcagcagccatggcgcatgcctgctcatggtggttataaatacagtgaagcccctcctggtgccccaggccgtcatccagatgcatggcgcctccccctgtcaccatgaaagcctggctgattccctcctccaccagcttgcctgctatataattggaaatcttcattttcataaattaaggtcccccttccggtctatcaactatggagagtatagcataaaacgccttaaaataatactatattttctcttacaatgaccgccggagcggctttaggggcccccctccagtgccttccataacttccagcaaccatcactatcattacacattcatgtccgttataataaaccacgtaatgcaacaccggattttcggccacagacaaacacacatatcaaaaaggagagattcattattatgaaaaaacagatcaaagttctggctgtattatccactgccatgttcatggcagcagtaacccctaacttcatcggcaccgcttccactgcttacgcaaaaaccgtgggctggacagaggaaaacggaaactggtattactatgattcttacggagaggcaatcaccgatacctggaagaagaatggcgatgactggtactacctggattcagacggaatccgcgccgctgacagacagattgatgagtattacgtaggagaagacggaaaacgcgtgagcatgaagtgggtttccgtggaaaatgaagatttctgggatgaggacgatgctcctgaattcctgtactactattatggaagggacggcaaggccctgacctccagatgggcttccatcaatggaagctggtattatttcaacgaggacggtatcatgcagaccggctccatcaccgtagatggttacaactactatctcggcgaggacggaagcagaaagaccggctggattcttctggcagatgaaaccgatgatccggaatacgttgaatcatggtactacttcgacaatacgggcaagcgtattgaaaatgaagttgacaaaaagattgaaggccagtactacacctttgtggatggccgcatgcagacaggctggtacaagcttcctgtccaggcagcagcagagtccggcgaggcccagacagctaccccttccgaggcagctcctgtgtctgagcagaccgctgccggctatcagtactacgatgaggacggaaagcgcgcttccggatggagaaccatcgaaggcatagaaggactcagcgaagaagccgagctttaccgcttctatttcaagaacggcaagccctaccatgcagaaaaaggccttgaactgttcaccattgaatccagaaaatacgcttttaacacaaagggagaaatgcagaccggcaagaaggtggtaaacctggaggacggcaacgtggctaacttctactttgatgaagagggcgttatgaagaccggcaagcaggtcatcttcgatgaggacttaggcgagacccagaactggtatttccacaccgacggctccagaaagggccagggcttccacggcatcaaggacaatgtgctgtatgtatacggcctgcgtcaggaagctgacaaggacctgcgctttgcacctgtagagttaaacggcaatcagtatcttgtaaacagcaacggcgccgtacagaaggccacctcttcctccaaatcaaactccatgcctgagcttggcagcggctacaaggatttcaaggacgagaacgacaaggtatggaccgtaaacacagaaggtgtcatccagactcagagcaccgcacagtaacagatacacagcaaccataaggccgcccctgcatccgttcatttaaccggcggcccacggcagactaaccaattagtctgccgtttttttgtccaatctgacgaatttacaaaaatcgcaaaaaaaagtggtatattttgcgatttgaaacgctatatatattaataagtattaatcaggagaggacattatgagagaacttgctgttttttattgccccaaatgcggacactatgcctattatcagacatcccgtcatccccagtgccccaaatgcggcacccaggaagccatgcacatggtcaggatgcattactcggaattcatgcggatgtcctgcgatgagcgtgacgaatttctctccagggaaatcctgaagaccaatccgtcccttatcacccggctgaccgaaccccataagcgctacaacagccgggaaatcattgctgaaatgaacaacgtaatcatgaacctggatacagaaaacaaaattctcagcgatacggtaaaatggatgcacgatactatatgggaactgatgcatgagaaacgggaatccggccagggcaatgggacggcacccggcgactgcggaggttaccgggacttccgggactgcgggaactgccgggaccgggaaccatcggaggaatgcatggaggtaacagcgcacaccggacaaacagaggcagcatacagtgaggccgcagcagccgatatgtcacagaccgaagaggcagaaaagggatacaaacgatagctggctgcagctccgggaaatccaaatctgaaaaccaaatctgaaaaacatataaatttccaattttatatatcttttgtgcaaatagtgcgttataatagtacatataagaaatgttttgtgcatattttcatttttaaggttggaaaggagtggaactatgagccataagattatcacgatagcccgtcagttcggcagcggaggccacgaagtcgcccaaaggctgtcagaccagctggggattcctctctatgaccggaatctggtggagatggccgctgaaaggatgggacattctcctgtaagcattgaaaaggcagacgagtccgcactgtcctccttcctggccggctatcagattcccaaggagcctaattccgtaaccggatatggattatccctgaatgacagcacttatgtcacccagaccattattatagaggcactggcccagaagggcccctgtgtcatcgtaggccgctgcggtgattacgtgctccgcagccaccccgacctgattgacgtatttatctgtgcggatatggaagaccgggtgcgccggattatggatcgctacagtttttcagagagggatgctgtcaacgccatcaagtccacggatcgccgccgcaaaaactattacgaaaactacaccaaacgcaaatggggcagcattgagtcccaccagatgctgcttaacatcagtaagcttggcatggacaagaccgtaagaatcattaaaggaatctatgaaaccccataggcctgtttccaactgtccataaaaggcaggcgtctgaaggaaaaaccttctggcgcctgccttgtttttgtgcatctgctttttttcctgcatttattctccggatgtatctccccgtcccattcccgtcttggaaatatacccctcatactgcctcagcgcattctccttaaaaggagcgctgaccgtaaactccgaaccgtcaaacagggtcaccatacgcacactgaaggtggccacatacctgagatttacggcataggacttatgcagccgtatgaaaccagcctggtccatgttgattttggaaaacaaattttctaaggtggaatagcaatgatatgtatggccggcagtcacaatctttacccgccggttatcaccttcaaaatagaggatgtcttttaaaggtattctgtatacggtccggcttgatttgaattcaaagattccggcatcaccctctatcttttcgcaagctttataaaatatattctggaagtcctctggcctgattggcttttttataaaatgaaagggctggaactggaacaaatccagcgcgtattcatccccgtaagccgacatatagacaatcatgctcgtatcattgcccagctcttcccgaatgaacctgcccagttcaatcccgttcctgtccctcatcacaatgtccagaaaaatcaaatcataatgccgttccttgagtgcttcctcaaattccttaccggtgttgaatatctcaacctccagcctgcgcccctctttccatcgcctgatatagtcctccagctggctgcacacctgaaagtcatcatcacatattgctatctgtatcatgcacctgtccccgtaccgcaattttaatctttagtattttacacccccctggtattattaatcttaaaatgttgaaaaaagacgattacacgttgaaatttgtcaaaaaatcaccctcccagggtaatatcctgggccgcgtaccacttaagggcatcttccacatgttccctcttaaagtcaggccagtaatcatccaccacataaaaatccgaatacacggactgcaccggcaaaaagcctgaaaggcgccgtcttccgccccaccgtataatcaggtcgattctggaaacctcagctgttttaagtcccggccctatggtctcatccttatagcccaaatcccactcccagctgtagttcaccaggaagttaatcttcatcccgccttttccaaaatcatgcctggcggtaaagggaagaagctcatggggaaacatgggggattttgtatttcccagcacaagcaggctggcatcttcctttgccagctcctcaaccgccgccacacaggccctggtaaatgcctgtctctgggcggaaggacgctttgtgttatctgtggtaaaaccataaaaggacatttccccaattcccagctcccggcacatgcggtacagggacattccaggtgaaatcccgtgcccgtatccctctgatttatccattccctggcctttggcccatctccggtttccatccgggatgattccgatgtgttttggcagtctcataccatctcctccattcctgcttatatatggaaagtatggtcttaaatggaaaatctatacaaaaggctccaaccgtgtgttagtcctccatgattttcctgggtttatccgtaatcagattatccgcccccgctttcctgcatttgtcaacagagtaggcgtcattaacagtccaggctatcacttccttgcccagggaatgaatacggctcaccgtctcaggattaatgaggtctatgctcagcacaaaattgtcagcgctggtaaatgcctccggctgctctatggccttggatgagataaatccagtctccagggccggggccagctgctttaccgcctgaagggaatggtagtcaaatgaagtgatcatgcactggcctgccatgcccttgtcctgaatcagccctaccaggcgcgcaataaagtcctgggtctggtggtcattgacttttacctctatattcagctttatcttatccttgcagtaatccaatacctcctccagcgtgggtatcctggtatccttgaaaaacggcccccaatggctggcggtattaatttggctcaattcctcatagctcatatcccatatcttatccggctttcctgtcatcctcatcaaatccgcatcgtggaaaatcaccaggaccccgtcttttgtctgcgtcacatccagttcaatccagtcagccccattttccactgcggctttaaaagccggcatggtattctccggcgcctgggtgttgtcccccctgtgggcggtgatttccaccttgtctctccatccctccccagtccggtcctttgccaggacccggaccggaatcatggatacaatcagcacagcgcctaaaagggctgctgccatgtgtcttttccgtattatattaacactccttactatactaacactccttactatactaacattccgtactatatcaaccttccgcatcatatcaaagctccatctgtattcattttcaaatgctgtctattccggttccccatcctccgaaacgtcaaatgcaaggcgcatctggccgccgctggcaggacagacaactgatttcatctcacgcaccgtaatccgttcctccccggtgagccggccgcacaaaaggggcgagtccgggtcatgtaacctgcgttttacctccacctgctccgggctgaaattcgcataacaatatctgcagagatgggggcaggtgttgtaagcgccgatatccacgctcttgacacagccgcattcctccctctgggtactgtctttttttacatccaggggacggcccagcaatccggcaatcagctggtcatcaatacattttcccttctgtatatggaaaccggacaaatccgctgcctccgaacatgtccggacggtcatgccatgccgttctgcctccggacccataaaggatgccagggataccatgtcctcccctgtcattgcccgggtctgaatccgatccatccgtccttttatcttccggtacatatccaggaaactgatgacgcaggtatgggtatatccctccaggctgctgcacagccgtgaaaaccactggaaatggtactccctggtataggacggactgagaagcaccggatcatacctccatatgacacgctcaggccccagcctggccgacagctcccggaagttttttaccagctcattcttatggggaagtccgggttccacatccgccccatagggtgtcagggtgaactggaaataatagggatatcccagccggtccaaaacggaaagcctctccatcataggccccgggtcctttgtccagaacacaaagcagtccacggtgtcctggttcagaagaatcttgctgacctgcccgggattcatggggttctttacatacaggtacccttcctccagccgtttgaaaaaccagtccgaataaaacgcaggaatgtctgtccttctgctggcactgatgatcatggcggctcctcccttctttgtcttacgcggcaatctgtgtagtctaatataacatatggggtggatggaagcaatctgtgagggaattaaaatccttatatttgcggtgcgatatcataaaatccatccggcgggcggaattttattcccccggccggatggattcagctattttcacccgtattatcttatctgcttattttatctccccgctctgctccttggcccagtggtccactatgatacttggagcatacacaaacatcatatgcagttcctcttcacctgtgttatacagagcgtgttttaaattacctggaataaagatacagtccccttcctttaccggctgtttctccccgtccacctccatctccccatgtcccttaataatcgtgtaggactccaccgtctcgtggtcatgttccggtatgccgccgcctttatacaccaccacatagccctggcagaacttgctgccctccatggcgccattctggcccagtattaccctggtgcgccgtccggccggaaattcggttccttctatatcccatatatttactttttccatttcattcctccagattgtccggaatgtgtctgagcatcccgttcagacgcactccgggaaatcagattcttcacagactcccgttcaatcagcctgcctttaaaataagtctggctcttgtgtgcgcaggtctgcgtctttatctgctccatcagctgttcaaatatgattcccgccgtatctgccagggaatgacgcagcgtagtcagaggaggatccagatatttcacctgagggatgtcatcaaaccccactacggatatatcatccggtatccttaatccgcttttggtaatacccctgtatacgccgtaagccataaaatcattgaacatgaatacgcctgtgggacgttcctcgtggcgcatcaattcaagggttttataataggcgtcatcctcggattccacatcgcggacaatatacttttcgtagtcctctattccgcactccccaagggcttccagtgctccttccagacgttcccggttatattggcggtctttatcattaatataaagggcaatcttccggtgtccgttgtctgtcaggcacttcactgcctggtaagccgcgtcggcattgtcaatattaatacagggggcatccacatcaaaggtacggtttacaatcaccatgggaatctcccctatgtatggtttcacatgttctacatcctctgtggatgcaatatacagtatgccgtctacaaacagatatttaagggttttaaaatactccttctcctttttcacatctcccagtgcatcacacagaatcagggaatatcctgcctttgtagcgcatgcctccatatattttacaacctccggataatatggattcatgatatccggtatgataaggccgatcagcttgctgccgccttttttcaggctcctggcagccaggttgggcttataattcaaatcactgaccgccttcatcactttctcttttgtctctggctctacaaatgccacgcctgacagtgctctggatactgtgctgggagaaacccctgcatattttgcaacatcacgaattcctaccattggtattctcctttaaccgtcttttaccttataataccatcttcacggtaatctttccagacattttcaaaccagatttcctcgtcgggaaggggtcttaccggcctccaggatacgcggcattcttttctgtccgcctcataataaatctcctgcagtacggttgtgtccgtctcctccgtcctgttcctgaaccgctcatccaaatgcgggttaggtacctgccccccggcattatataccagataggatcctctgctgatgcccactctggcgtcataatccctcagtgcctctaaatatacaaactggcttataagaagatgcttcagtttatacaaatccttaagtacctccggccccttaatcataaccttctgctccagctgttccctctgtctcaggttttcctcaagcgctgtccgtatcccttcctctgagcggatacatgcaccatatttggtcatcctgattcccagcagccttcgctggccggccacatccgtcatacagccttcagacccgcgcaggacgcgttctccaaaggcagtctcctcttccacctccttcatatgtctgctgaggaactgctccctggagcagggttctcctccataccgcttcacaatatactggctggcgcgtatggcgccgacctgccccgcattcagtgcgcttcctccgggacggtatatgccatgggaaccattaacctcaccgaccgcaaaaagatgccggatattgctctcccaccactggtttcctccaattcccccgttgttatgctgggcgcacacagctatctccagatactctccggacaaatcaatgtgatggctgctgtaaacttcaatggccgacggattcatatgtttcagccgctcatagggtgtatccaaaagagccctggaattctcaagatattcccttgcctcacctgccaggtaccggaacgagacatttcccccttccatcagcggggacgggttatgcatgaaatccagaaagacccgtcttccctttaagactgtctcctgataaacaagcagatcaataagggatgatccctgcccttcaacctttctggggtcaaagggccactgatacccttttaagaaaattgccgtcagaagctgtctgggcgtgtcaaaataatcattcaggaattccctctcatggcttccgtcctgctccgcagacagatatcggggcaggcattgctggaatgtccctgacagattccacctgtgttttacagatgcaattccaaactgggactcagtcagattctttgcaacagctcccgcctccagcagtacccccattccgcctgtctggctgacaggatatacgctggcctgatacattccagcttccccgccggtggcccatataatgttgactgctgaaaatacggcataccgttcatcaggcgaagcggccttttgtttattcagggcaatgatgcctgccgccctcttttcaccgtccttctcctctgtaagcaggcgtactgcctgatagccgtcaaagaacggtattccccgttcctctgcctggcgttccaaacattcggtcatgtatttggatgtcagcggccctgcggaaatacctctcttaagaggatcatggtccgtcttatatcccacatattccccgctcttattaaaagggaaaggaactccgatatccaccagatggtaaaatgccctgagagagcctgcggcctcggccatggcaatgtctccatccacacatccgccctcaaacaaggtttttgccattttcctgacgctgtccggttcactgccgcactgggtcatcttatagtaggtctgtttgtctgaacccgtattcctggaagttcccatgtaccgtccttctgtaatcagggcaatgtttttctgccccagcttatgaagcgttacggctgcattaagaccggctgctccggttccgactatgattgtattgtattgataaaaaggtatcctgttaatatccatatgctgaaaccacatcctataaacgccggatgtggaaccctccatccacatctatgtaattgcctgtcgtgtaacagaaatcgtcggaacaaaacgccctgactgcctttgccacatcctccggaactccccatctcgcaatggggaacatcccctgtttgattaattccgtatacttttcttccacctggctggtcatatcggtacggatgactccgggccttatttcatatacaaatatgccctcaggagccagcctgtccgcaaaaagcttggtgagcatggagattcctgccttggaaacacagtactcccctctgttaacggatgataccttggaggagcaggatgaaatgttgataattgtcccgcgcttgcctccatacacaggctgtttcatcatctgccgtgccactgtctgtgtcatgaacatagttccctttgtattggtccctattacatagtcaaagctctcctctgtcatatccagcaaatccgcccttaccttcggcgccacccccgcattgttgaccagcacatggatttccccgaagtgttctgctgcttcccggacaatacggattctgtcctcggactttcctatatcaccggcataccaggcataggaaatacctgcatcccggagtgttctggtactttccggataaaaggattcaccgcgtgtagccatgacagcaacctgataaccgtttacccccagttcccgcgcaatggccaaaccaatccccctgcttgctcctgttacaagtgctgtcttcatatccggttacctcctatttcataatcagttcaggcagcgtcattgtcagcgccggaatgaaggtcacaagcagtaatgtgatgagcatgggaatatataacggcagcatggcctttgaaactttttcaattttcatatttccaatggcgcatcctgtaaacaatgccgttcccacaggcggtgtacataatccgattcccagattcagcatcatcatgactccaaactggatgggactcatcccaaattttgtcacaaccggaagcagtatgggggccataattagcaccagaggcgccaggtccataacgcatcccagcaaaagcagaatcaggttgatcaggagcaataccacaatcttgttgtcgctgatgccaagaagcaggtttgtggccagggtggggacattcagatatgccatcacccagccgaaggcgcctgccgcggcaataagcgcatataccatggaaagggttttaatggtatttcccagcactaccggaatatccttaaagcgaagctccctgtaaataaaaaatcctacgaacaggcagtaaatacaggcgactgccgctgattccgtggcggtgaaaaaaccagctgatacgccaccgatgataataaccattgcaagcattgcgaaaaatgtatcctttgtaaccctgagtgcttccttaaaaggcagcttctttcctttgggataatgctttttcttggaaatgatataacacattcccattatgaaaacccccagcataatacccgggatataaccggcgcagaacaggcttcccacagacacgcctcctgccaccatggagtacagtaccatgttgtggctgggcgggatgatcagtccctgacaggagctggccacggtaactgctatggaaaaatccttttcatatccagcctcctccatcatgggtatttccagggctcccagggatgacacatcggcaatggcagaaccggagataccgccgaacagcatggatgccagtacatttacatgtgccagacctccggttatctgccccacgcatacatttgcaaaggccagcaggcggctggatataccgcctgcagccatgatttcccccataaggatgaagaaagggattgccagcagtgaaaatgagttaagctgtttggacatttgctgcaccagggtcatgacaggcacctggatatacagcatggtgaaggctgtggatataatcattgaaaaggtaatagggcatttaatcataataagcagcacaaaggttatgagaaggattgcgatagctatatttgggttcattctttttcctcctcctctctgttaaacttacccgcatcatcggttttcttgtatttcttcaggcccattatatccagaaccgtaaagtagataatggcaacgccgctgaccggtatcataatatacataagagatgacggccattttgttaccggaagcctcgaatccatggtagacagcaccatccggaccccgtagacagtgaagaaagcgcctaccagcagcgtaataatccggttcagcacatcaatcacattcctgatctttaccggaaacttatcataaaacagctctacgccgatatgcaggttcttttccgccccaatggcaatgcccaggaatgccatccaaatcgtaagcagcagcgccacctcctggttccagcggatattggtccgcagtatattcctgcagaatacctgggcgcatatgattacgattacaacggccaggacccaccttgcataaccatatataaccttgtaaaacagattgaaaatatcaattagtaccttctttattcctttcagcatcttcagtctcctatatgccagtcccctacttgcctgcttctacaatctggtcaatgatgtccttataggcgccgccttcataggaataccagattggctcacaggcgtcctggaacgcctttaattcttcctcagtcaattcagtgattgtgacatcctgctccagcaatttctgtttggattcttcctctgcctctgcccacagctccttctggtactcccaggattccagagccgtgtcatcaataattttaagatcttctgcactcagtttttcacgtgacttttcgcccatgaccaggatgtcggccgaccttgtatgatggtcctccacaaagtaaggagccacttcaaaatgggactggtccagataattgacgatggaattctcagcagcgtccacaacgccggtctggagcgcggaatatacctcggaatacgctgtcgctaccgactggccgcctaaagcctccaccatggacatcatcagttcggactgctgtactcttaccagcatacccttcatgtccgcaggggaatggatttcctttttggtgttatagaaacatctggttcctccgtcatagtaggtaaggccgtaaagcttcttttccttcatcttatccccgcgcaggattcccataccgatatccccgccatgtaccttccagaaatgctctgtatttttataaatataaggcatcattaaggcattgtactcatccacaaaattagtcatggtggacaggtcggcttttacaatatccatgccgccatactggagctgctccaggcaggagatggcatctccaagggtgccgttgttgtacacctcaatgttgacccgtccgtctgtgcgctcccttacctggtccgcaaaccactccacggctatagtggtacagtttccatccggctggttattggaaagttttaaggtgactgtgtcaccggatgcctcagtcttgctctcctccttattctcctcctgtgcggcagtatctccttctgttttttcctctgccttagcctctgtctgtgtctctgagccggaggatggtgccgctgtggttcctgcatttccccctccgcatgctgtcagtgtcatcacaagacccagtgccatcataacgcttcttttcttcattgtattcttctccttttattcctgcgcgtaacgcgcataattaacctgttacctggcagaatacccgccgtctatcggaatcatgatcccggttatataatccgatgccctggaggcaagaaatactgccggaccctcaaaatcatccggggtcccccaacgtcccgccggaattcgctcatccatgggctgccgccgctttgaatcactccagattgcctttgtaagctctgtggctatgtagcccggcgcaatggcattgacgcatataccgtaaggtgcaaattcattggacaatgccctcgtcatgcccatgaccccgtgtttggagcaggtataaccgctgacctcaacacctccgaaggtggtaaaaagagaggcggtattgatgattttccctttcaacccttggtcccgaaagtgaatggcggccttctgggacaaccggtacggcgccttcagattaacagcaatcaccttatcaaacatctcttccggatattcaaatgcattcttccgaaactgcatacctgcattattgcacaggatatccacatgaccggcttcttccaaaaggcgtatccacacctcatccacatcagaagaaactgacaaatccacatggtaacaccggcactcccgccccagattttcaactgtccttctggtatcttccaaatccccgatatccagcgcaatgatatctgctcctgccctggcaagcccggctgccatacctttgccgatgcctgttgcacagcctgtaatcactgcctttttccctgcaagagaaaacaatgaatccatatgaaatcttaacctcccctcccatgaaaacggtttcttgtatcgttatgtacatattaactcatgaaaacggtttcgtcaagagtaaattgtagattttttaaattataataaacaatataaaaaaatggaaagggatgaagattttacccttcttccctttccgtctctcctgtaatccctgaaatctattattaattggttctccctgttcatcccttctcccgcttcgccgccagcagcctgtccaagtaaacagacttgaactgtttgctggccatggcctgcttaagcggcggcagctccaggatagcgctgaacagggcggccatggccctgtggttggaaaacgcctggttgtcaaacaccagattggccaatgttcccttctcaatggcctgaagaacaaatctgtgggtgctgttcaccggtgtgatgatctgctccgtcctgcgctccatgtgaatggccttgacaccgcagttcctggcacatacgccgcagcccagacaaatatccttatccaccacggcccgcttccttccgttttctccttcctccatggatatagccaataccggacatgtctttgcgcactttccgcagccaacacactggtccccggtaatatcaggaatataattggtggtggccaccggctgcatgggactgaaatgcctggcagcctggagcgcctcacagcagcacccgcagcagttgcagataaaagccgggtgctcccgcacattttcccctatctgtaccagattgctggcgtaggagcgttccagcgcatccagcgcctcctccctggagataagtctgcagtaatccccgtgctgggccagggaacgcgccacattgtcaaaggtcaggcatacatcccagggagcgttaatctcgcagggatggcctgcgtgagacattttatgacggcagtagcatagccccagaccgatatactctgcctcctccacgatgtgggtcgcccgctcataatccagaatgtggttcatcttgtcattggtcagaaccggctcctggacaaacacacggcccagctttgtctccgtggcataaaacaaatccttgataaaatcctcctccacattcatatactggtaatacaattcactgagatacttttggtcaatatctcccctggtcctcatcagggcaaattcaataaacccggccattggcgggggcatcacgaatttccgcacccccttgtcccaggagtccaccagcaatgccttgccgcacagatgatctaacagcttttccgccttatactccgaagtcccccatatctttgccgccttttttatggtaaacgggcgaaccggcagcagcgccacccatttggcctccttttcagaatataggacctgcagtatcttatacagtgtctcagaggccggggccccctgggtaaaccagttgatacgttcacccaggttccggtatgcgtcacgggttgtaagatgtcccattgtctttacctcctccttggattttccttgattgttcccattttttcctctgccataccgcggagtgactgaaccctcattcctgtcagataaaccgcgtcatgcccgggcatggaacaaccgcttcaccatctactttagcactgcaaaaaataatattcaacagaaagtacatcacatgcttcctttccacaaaatcctgttttgtttcgttgttctataccattcatccgccaaatcgaacatatgttctgatttttcttgacaaaatcccccctcagtgatatctttaaaatacatcacagatttccttttccacatgagaggtggaaaatatgcaatattacatacgcattgataaccggaatgtatacgtgtcagaagaaatttataaactatactgcaaaggcgagcggaaggagcggtatttccgggaatcagatattcataacaagacattttattataatgcactggacacagaagattttaacggctgtgatctgtttcaggacacccgagccaagcctgtggatgaacaggcagaggaagctctggagcgctctctgctctttgaggccatgaaggacctggaccccagagagaaggatatcatacgccgtatttactgttacgaccagtccctgcgccagatttccagggaaaccggagttcccgtaaccacccttcattaccgtcatggaaagatcctccgcaaactgcgcagcctcatggcctgaagggaaggtgctgcacagattctcacaggcatttaggccaaaaggccgcccgggcccacattcaggtatctgtttcacatgcctgtcggctttggacggccttttctatccggttttaatcgaacatacgttctgtatatcggatgaatcttgtaaccaccccatgaatgcttttaaccggaacaaaggaggaatctggtttgaatattgttatatcaactgaacataatcagcttttcagacaactttacgcagctgcagacgcagccatctccaaccggcatctgcggggcatggagctatatgccttcagaagcctgacgccggaagaactcatcaaggaagctgccggctctcccgcagatctgtggctcatgttctttgacagcgacagccgacctgactggccggatgtactggacaggcttacatctttcagcagtcaaattatggtctgcatagtgagcagtgattacagcaccgcagcccgtctcatcaacagccactctgtccgcggcgttgcaggttatatacatcctgtccatgacaacttagagcgctcctgcctgaacatcctgacctatctgaaccgccgtgtaacttccgcagatggatttctaatcgtgcacggcagcagccgtgacacccggctttccttttccagcatctattatatagaaactgtaaaaggaactcatatgtgcaatatacactgctcagacggagtatataccttccgttccggcataaaagaattgtcagaaaagctgaagccgccctttcgtcaggtccgggcatccaccatagccaatctgtcaaatgtccggtcctttgaaccaacccagggcattctttcctttacaggcggtatttcatgctgctgctcccgcagctacaggcatgatgtatccgattatttccgcaggcatccgcgtcatgtgcatgcggaaggggatatggcggaaaggggacccgggtgacgggaaggcggcagggagagaatacggcagagaaaaaactatccgaaacacataaggcggacactttatgcagagcacattaaaagggcagagtttcccacctctgccctttcctttcacatctatctataattatctgacatttccctggggcagtaccaaccaccgcccttctgtcccctgtcatgataaaaataactgccgttccatcatccgccgtctggtgagtccctccagtacctttcctgccgctttgttccatttaggaaattcatccgctgcccctttcacatcacctgcgtgcagacgcttcaaaagcgtactgttcctgagagcgcctgcccccagattataggcaaagcttaccagggcatcaaactggttttgggttacgctgcactccagcaccttatttacagccttctcaaaggcccttaggtcctccctcaaatatgcctctgcctgtgcctgggtaatcttcattcccatggccacgccggccgtatgcccatatccaatggtggggacccctgccgcgcagcggtacgcctccaaacggcagccctcaaactgtttaatcaggcagatacctgcatccgatatccttcgttctccctgggcatatcccgctttacgatctgcttctgaagcggttcctgcctttgtgaccggaggctgcactgcaccagccgtatattcgctgccctcgtacgctgccagcgcaggagtttttccttctgttttgccaggtgatgtatgttccggctccctgccgtctccattttccaccgatattcctcccgtactaatgggaatctccgcggattcttcttccggaaaatgcagtacgccgtttttgtccacctgtaccataaaccgtgtcccaagctttgccatctgcccatcccggttaaagtaatacggctttcctttgataagctgaaggcccttaaccattgcaaaatccatcccaaaataataccaattatctttataaagataccagttattccgcaccgcatggccggaaccgtcgaaccagaaccactggcctttgtcctgataccagtcattggccacataccgttccggttccagataaaaacggacccctccgtcttctttgacccatcccgtgggatgggctgatggaactgctgattcacatacctgctctgaatagtcaatatccttaagtttcagcacactgacccagggtgtatcctgcgcccttgtctccaccgtaccgtaattgattcccttggcctcaatgcatgttccgtgtccaatgtacaccccgatatgccctggcttccatagagcccagcctgccattgattcattcaatgctcctatgggctgtacctcacgggcagtctccttataattggcgcttcccctcaatatgccggtgcaccaggtaatcaggccggaacaatccgtacagtgctttcccataaaactcctggccttagttatgtactggggtgtatagaccttggggttttccgctgccagctgtttcagcagcgcttccgtcaggacctgccccttcatgccgaacacatatggtgtgcccagctttcccttgcagaattcaatcaattccctgcttgtcttgctcataatttattttctcctctctgttcatgaaccggtatcttctgtctctatgccagtaaaatccgtatagtaaatattctgccgtacatccatcagcatgaaaccgtagaaatatccatccccggatacaggtactgtctctaacagcatatcatccggttcttctatataaaattcagttcccatatagtagctgtccgtgtagtacctgtcctccgtgatttggtctggattatgactcgtctctccgtgagagctcccggcagtatttccggtttcatctctgatttcatcttttgtttcatcgccggcttcatctttggtctcatctttggccccatctatggtctcatctttggccccatctttggccccatcaaccggttcctcctccacgtcctccatatgttcaaccagataaagcggagtcacccgatccccctcctttaactcataaatctgctttgcggcctcggaggtctgccctgcgggtgtcacggaaagaacctgcccgtcttcatgctcctcgtcaaaccctatccgcatcgtgcacaactccccattatagagcaccggggccatatattccgtgtatgcatccagattcatggtttcaatcaggcaaagtacctgccccttcattcccatatagctgttctccggagctgcccgcagggtaccgtccacgccaatatccacatcactgtctgtacagagaaggtagtagttcccgtcatcccccacaggacagaatacagccaaatacgctcctgtcacgtcggaaacatcctcgggggctatgctgatttccacggtgccgtccttatgtgcatttatgttcccccattccacgccgctttcccgggccagatacaccgcatatccgtccgtcagctgcctgtaggcactgcagaatcctgtggtatcatacgtttcaagatcctcgctcagataggggttggaaccgcttggcaggtatatagtaagaccgcttggattcccgggatagcctttggcccactggtccgtcacaagcttccccatccgctccttcaatgtctgaaaggcgctttcatccggatatacgctctggcaggcatccaggaattccagtacatccaccagctccggagaacctcccgcctgtctgctgccaaatgccagcattttcattctgtcctttcccagctccctgtacagctcttcccgcagttcctggggtatcccgtccacatattggtgaaatacctcatgaaacgccggatattccttcatatccaaaaggctcatggcaacaggcgcagtacctgaggcatagtaggcatcataggcatccaccatagaccggcctactgcttctccccattccatatcagacggcagactgtctcccagagctgtcatccagctgtaatcatatccatcctgaggttccagctccggagatgcaatgacatagccggcccttccctccagacagtcagcaatctccacgcttcccataaggcaggcgtcaaacgccacaaagtcaaacgctttgtctgccataacagaatggtccagagcctctcttatctcctctaacgagagcccatccccgtcaaaatgactgtcgcttccgtatccacccaccggacctcctccatgattccacagtatcaaaccataatggttggccggataagactggacgccgtaattgacaaaatccgtcaatgtatccgcatcccccatgttcctgatttccatgggttccatggaggatatcccatcctctgtcagagaaaatctggcataaggtacaccatccatttcatccagctcccaccgggtggaaccgcccgcctcaaccaccacatgaagagagggaaaattttcctcctgtcccgccgtccgcagggcatccatcatttccctgaggtccgctgtggctgctccataatccccttccaggtcgcttccgttcatgtaaaccatgattgtactgtccgccgcctctgcggcctctgtatactcttttacctgtatgccctgacgctcagagccgctcaccgtatagagagccgcacctgccagcagggcgctgagggccgccgcgattcgcggcgcagtgaccctctttcttttttcatccatctgccaatctccttttcattatctgttcaaaatgatttttctgcttcgtgttttaacgcctcgcatcttgcctgttcacagcctacagcctgctgtcatacctgcccttgcggctcctgttcctcattacgcgcacgttctcagaggtccgggccccaaattcctgcctggcctcgtccatatactggtgaatcaatccctcccgggaaagattaatgtaattcttgccgctgcggtccacaggaaagctgcggtacatggcttcctcggtcttattcagcacgcgctccatactcccctccgccgcggacagcgccttcttctgtttctgctcacctgttttctgcttttgaagctctgcatacgccagcatctgttttctctggctctccaccgcggacatgctcttctttacctcatcgtacagcaactttgcctggtcgtaattgcgaatgacatccttcagctcagacagctcctcatcccggaacacgccctccttttctttcagggtaatcttgcgctttaatccccccatggagccggacagcgccttcacgtccccggcctgttcccccgtactcaggataccgcccacacagtccagggcattcatatactcctggttcatctggtcaaagtcagacatgggttcgctaaactccctgatataggcttcctgcatggaacgcatcagccttgtggaagatttcatctgttccctggcacctgccaggcgtctgcactgctcttctatggtatacgtctcatggctgtaccgcctgaaattgctgcggaaagccccgtcctcaatgtggtccaaatcattcttcatctgcccgttcatattgcctgataccgcgcctgccgcatcggatttcagggcagagtggcccatctttgtctcgtaccggtaggtctttcccagggcgacaaactcaatggatgccctgaattcctgttcactcatattagccttgccgtacagctccagccggttgatatagaaaaatgacaatgccccctgtatcacggcattgaccgctttcatgacgccttcacccaccttgccagccaactgcaccgcggctttggccacctgaagggcggctgtggccactccgattgccacatatatgccggccttggccacctcataggctcctatctcaattccctttgcaatggccacaaatgccttcttccaccacttggcattcctgatggagcgtttgcagtcctcaattttacggttcagggaatcaatctggccatacagttcattcacatgggcctgggccctgtcaatctccctggtagcatttttaatcttatccctgagccggtcaatggctctgtttatgctctcctgcaccgccttcagtttttccgccagcttggacgtatcaatcaccagacggaattcaaacccgccccggttaaaatcctggtaattcacctttaaatgaatgcttacatcaaaaatcgccagccagttaaaccgcacatcaatggatataagacccttacagaagataatcctggtttcaaaatacaggatggacagcagttcaatccgtccgtccagatagaaggtcacatccttcttgcctgcggacaggaaaaatacaatccccctctgctccttacccataaactgcctcagcacactgtccgccggcacgggaagggcttctccggactcctgccctgctttggagggacctaatttcaggaatcccagattaacctccggtatgcgtccatacgccagcaccccatccccctcccggaaggaaaacagaacctcgaaccggaccttgaaaatctcaatgactccgcatacaaagattccccgctccaccgtgtaactgcccagcctggtatttacatccgcatagtagaactgggccgtaagctttataccgcctgaaccgtctatgtaataatgccgcatccgccgctggtccaccaggtccactccatctccaaagtgagatgcctttacctgatccctttccaataccaggctgttatcatggattctctggttaaatgcctctgccagccgggctccgtccgcactcttaaccatttcccggtcaaatgcctgcatgtcctgaaaaggaagccccaatatacgtataaaatcaatgctgtcaagaccgtcaaaagatagtcccagcagatttctcaccaaaatgggaatggacaggtcactgactgctgcggacagcaaatccagctttgggaccgaccctgccacagtaagcattacagccccaaacaagtggatttcccttatataaagattggcaaacatggcaaaggacggcccccggtcaaaccctacggccagacaggtatcccctatggaaaagggaccagccaggggaatgggttccctgacctctccaaaggcctccaccataaagcgggttctggatatgccgcagttaacatgaaactccatatccggcacaaaagcaaaccgaaaggagccctgaagggccagggacaaggccctgcttcttagctcaactgccagacacatattcctgctctccatgaaactatttttagatgcaggtattgccgccatgcacagaaatccatcttcacccgcccccaggaaaagctgcgcctccttaaggccgaacaattccctgagcgctttctcaaacacgctgtctccattcagttttaaatgggagtaggtaagaaggcggcacctgtcaatccgggccggaaaggcctctgctcccggcgcctcagccatcaggtcccgggggctcagcccctttcccacacgtccgaagaaataaaactcctccatcccaaaaaagtccgctgtcttttttactgcatccataagggatgatacctgggcatttcccccattactgtctgctgaaaatgaaaaaagaatggctgcgcttcccctgcctgctgctgccttgaaatacagccctggttctccataacccagggctgtgattccatgaatgcaggaaagagtggctcgttgactggaagcatgtaccaggcctgaggcgtatgcctcgaatttagaagccatttcactgttcacagcctccaataatcctgagggccccctctggtccatctgcagttccccgtaaaatgacatttcgttcttatcataccagacagccagcctggccggacagcccttgacggctccctccacggctatactgcacgacatctgcctctggttcattcctgccgctcctttcctgcaatcgttccatgatgctttgtccattgcttaatgtaatgctttaaatgctgctttgaatgctgctttgaatgctgctttatctgcagcttcccaaactgtgtttcctgcgctacttagcggcctgactcttgtccggcagtgcggccacgcccaggtattcgtccacagtaatcagggccatcttgtccactaccttctttctgtccgtattccagacagaaatggaaaggttggtcacatccacaataggcttaatggtttccggtaccagaccttctgttaccacctgcagctgaaacgcatactccagaacagagttctctccctttttacagatgtacagatacgccatctgcagcctgattacaatatcttccagtttcatggatgtggagccgccgccctccttggcggcctcggtcatggctgtctcaagctgggtcgtatccacggcagtatcactgccagacacacccttggccatcttcttgatatcgtcaatcagatcctttaccgaaatcccactgtccggcgtctgttctgacggaatcaaaagaactgcgtatcctccctcatttttttcatacatggcatgaagctgggtcccaatcagggaaaagtcaatacctattgaagcttttaatgtgttgttttccattctgctgctctccttttcttagattattttgtattctatctatctcaatgcagccctccggatgactgcaaagccatcatacccctgaaatggcgcccactgcgccttgacggcatcctttgaatgattaccggcatgaatggctgttaattgctgaaaccatatcatgtttctgatgtaatatcctggcactgctctaaccagggtgtgattttatcaattcgcaccatcctcttcggcagaaaaaatggcgttctgcatgtaatgacctgctccacctcatccattgttttctgcaatttgcgtgtccattttcccaattcttcccaggtgtctctgtctcctccctctgcatacaatatacattctttctctgtaagctccattccggttaccgtatcatgggttctccagaccagccggctgtatgaatctgaaatcatctgttcctccccaccaagagtactgttcctgtcacggcacagatccatctcatccgccaggcgtatgatgcccgcgatataaggaaggcagacggactcggtccctatttgaaatgctgcgggaaaggcattttcatcccacaaatccgtttttctgtgtcctctcactgcctgcataacaggaaatacatactctttccggatttcaaaaatatcactgtatttttccacaagcagggcgctgaattcctgatgatattcccggatcaactctgcttctctgcccttggcaggatatagttccccgcacagcacaggggccagtccctcaaaatcagcttttgaaatccccatacccaaatcatggaacagaattcccgtcaaaagcacatacagctcgcttccattcagctgcagcagacaatcccccaccagctgtccggccagattcataatattcaggcaatgaaggctgctgtggtccgtgtactggggaaatacgttcctgtaccggtccagcatcatacaggctccggtggaagcttccagatagtttctgtgaaggctgggagaacactgcttcaagcgtttctgcaaagcgaactcccatttttctgtagcggtatggtttatgtacgtatcagtatgttttatatcttgttccttgtgattcatgtatatatcactccttctgctgttcataaaatggggttatatgatggccgctgtacgttcctgatcttttcttataatctctgactgtctttttcttataatgtctgtctgtagtctcttgccgtagcctcttaccatcatctcttgccgcagcctcttgccatcgtctcttaccataattccgtactatattctcctgctgaaatcccttctataaatatccgccatatatgcccacgccgtattttccctgtcatccattaggccttctccttccgccctgttcctgtctgtatgacgaatggctgctctcctccttctgccacatctggttctccttaagagacaaatcttccagtgcgtttaaaaacatctggtctctctgtttccggtctctataattccctacgcccaacatgtagaaagaagtttcgcttttcaagcgctccgcattggaacggtagcgaatcatattttcatgccatccgaaaatgccggataaacctccaacaatccccgacaaaccggataatgccgtgatacacaactgccgcatcccgtcggaaagcatgttgcccggaatggaattcagaagaagtatgagagtcggcataacaattcccatacaggcagacatataatagaaacactggcaccggttcgccatgaccatgtaccactccagcctgttaatcagccgttccctgatatacgggtctttgacatgctcctcaatactttttaaaaatgttctgtcattttccatgttgtaactgtccaattctaataatctcatttcactctaaggacctccttcggattatactcatgctgccatgatacacctagttcaggctaaaccggttattaacggcgcggttgaacgggagggcggcatggttgggtggcttggttcgccggcagtgttgggcagcttggttcgccggcagtgttgggcagcttggtttgccggcagcgtgggccagcttggtttgccggcagcgtgggccagcttagttcgacggcagcgttcgccagcttagttcgccagcagcgtggggaagtttagttcgctggcaacgtgggccagcttagttcgacggcagcgttcgccagcttagttcgacggcagcgttcgccagcttagttcgacggcagcgttcgccagcttagttcgctggcagcgtgggtcagcttaattcgccggtaccatgggacagcttagttctccggcagcatgggccagcttagctctccggcaacgtgggacagcttagttcgacggcaccgttcgccagcactgccaagcggcgccggcgcacgaaaaaggacgtcaagccacagaccattccatggcttaacgtcctttcacccaatcagtctctgaaaccccagtcagaccggattacattcctgcaaactgattctttaccttcatgattttctgctgttccgcctgctccatctgataccatcccttagcggacatctgcttatagatgtcatcctgcatacacaggctgtcattcagtgcctggttaaaggtctgatgcacattagctgtggaagactcgatggttccgtggacatacaggtcacatacacccttctcggtcagaagaaggttctccataatacacttgtcatccattctctgcttcctccttatacgagattataaaaactgtcaaaaatctgcttgtgcttctgttccatctgctgtgcctgatttttaagagcaggatcctgcagattctggatggcttcctggcactgattcattaaaaactgctcatggcctaatgcatcctcaatataatttaattcctttggactcataagatatcacctccatgattagtatgccgcatgcctttccaggatatgcataaacctgaatgtaactacaattgattaacttatcaagtggaatacatatagactcaatactaaaaggtccaatactaaaaggtcaatactaacagccccaatattattatcaaataaaacttgtaatttcaccctaaaatacagtacaatagtaatagtaacatgtataccggcagtcaattttccggaaccacaaggagggatattcaatggcaaaaaaatcactcatcattgcagccttggcagctttcctctccatgggcactctgttctccgcctatggacaggaaaaagcaatcacatccatacccttgacattttcctgggacacggccccaaagggcggcgaactggtaggcaatgtatatgcagtatccagcaacggtgaattcaaggtagaaggagcagtgtacgacaaaaaggatgaccagtgggactatggcgagaggcctatcgtggaagtggagctttctgcaaaggacggatactatttttccagcacaaaacgcagcatcttttcactgaccggctgcggagcccagtttaaaaccgctgaaaaggacagcgatggaagtgctttaattcttcaggtgtatctgcctgccatagacggcaatcttcccgctaccacgtctgtcagctggaacctgaccaccgctgtgtgggataaggtaaacggagccaaaaactatgaagtgcgtctgtaccgggataaaatactggtgaccacccaaaagactaccgaatccacctatgatttcagctcctacatcaatgtggagggaaattacaccttcacagtacgggcattgggcatctacagctcccaggccggaccatggacagataattccgagcccctgaccatccgcaccgaagacacctggtttatcaccaacggaacatgggataaaacctcatcgggttggcgctatgtataccctaacaatgtctatcctgtaaacagctggcgctgcatcagcgacaactggtattattttgggaataatgggtatatggaatctgattgttatgtaaaatcatctgaccaggatttgtattactggctgggaagcgacggaatctggaatactgagaaggatacggctgcgccggagtccggggcgcgggtagtgaaatagtaactatataaaaagctgtcatatcaatttaaaaagtccagattgatatggcagctttgattatatagatatttcctaacaaatgcatattgtaaatcagccttcaagttccgaaaacctgatttccaaataacgaattatatattcttttgccttttgtgtcttaatgaacctcatccagcccggttcagcactatatttctgattatctacatctgattggcttatgattgtcactgtgtccccatgtttaagaatggtgtctaaaggtctcatttcgttattaataatggcttgttttgcacataggccaatatctttatggatataaaaagcaaagtccagggctgtcaatttttcatcgaactcatggggccttttttctttgtcataaactataattcctgattttcgcttaccatgccacttttcttctgagaactcctgtattttagaactataaaaataacgtttacatatttcagttgtacagatgaatatacgataccgtactccccactttccctgtagtatgaaatgagaaagatattgttctgtctcatcttcatatccaagcagcaaataccccttttttacaaggcagtccaaataatacttcacccattcttccgatttccttctcatatatagaggctcggattcactatttaaaagataaacattatataatgggatttcatatatgacaggattattatagtcttctgcagaaacagtataacctttattgcataactggttataaaattccgactttctaagcttattgataaactttaactcaaaaatattgccgtcaatatcttccattaagctcttggtggattctgaatttacagaatacaatttttgtaaaagaatatctgttttctgaaaataatctttacaagtaacacgaaattcaacttccctgaactccttctcaaaataccgtatatgcaatcttctggcccataatacaagatactttctggttatctccaactcgccagacagcaccttgcggcttcgcactcgaagtaaatccaaatttttggcaaacaaaagaattagtgccagataatgtacatcctccatatcgttcaaaagcttttccattactactgaagtggctatagtatcctctaaatcatgataatactgtaacacctgcataagttttattttatgttcttccggtatagtcttcgggatatcctgaattaacacatcctgctgctgatcatacagcaatgctgccaatagcatatacgcaggcagacgaatttctgacattttcaatgccattctgcagtaatgtccctttgtacgctgaaacatcagaccttcagccgtcctgcgtacattccatttatccgctgtctcacacagatatccattataaacaggatatacatatttcatccgctgcttcattcgctcaaataataactctgccctcgacattgattttctcccccaaacctgtttatcagcgattatcctttatgaatttataccaatcatcatttcgttcaacctcaaccttattagtcctaaacagatttgcctcaatatatctcttgatgtaattctccataaggctttgaatcagtctgcgctttgtctcttcttcaaaagcggtgataggcctgtcattacagtataaaagcttgaaaaattctgtcaactctctggattcacgaatcaactccggattaatctcctcgaatataagcttttcgccaattgccgccggattaacttttaaataaaaacgggataatcctatattttggatacatggtgaagaatatctgcctttagaaacagaattaatagtgccgataccacctatatacttcggactctccgagttaggaatcctcaatattataaacgctttatctttctctccgctattcagattaataaacagattatcccttgaaaatgcaagatctccataatatacactggtatttcttctgttcctatatgcttccttgagtctctgttcacattccgcatcatttatttcaaatatcctgctgcattcatcgtgaaaaacttttgtcttactatccgccatattaaagctatagtggttcagttgtcaagacaaaaatctaagctttttataatgaactgatatatgtaactgggtaggg

SEQ ID NO: 3152 - DNA, 6192 bp, Unknown
  gut microbiota DNA sequence
atttagtatgaatatgcgtttggtaaggtttacaaaagggcttctggacatcatgttttatgtggggatggccataacagcggcaattccggttattttccattatgtaggtatgtatatagagaaattcaggacctactacgtggtccagtgtgctctttacatggcgtccggggtgctggctcttttgctggtgctggagctgcggcggatgtttgcaactgtgctggcagatgacgcatttgtgatggaaaatgcagcgtccttaaaacgaatggggaaatgcagctttctcatagccgttctgtctgttctccgcctttttgtggcgtttactccggccacagcagtgattattattgtgttttcaatcgcaggccttttctgttttgtgctttgtctggtatttgaacaggcgatccgctacaagcaggaaaatgacctgaccatatagacagggaggaatgacatgggaattgtaatcaatctggatgtgatgatggccaggagaaaaaagggcctgaaggaattgtctgcggaagtggatattaccatggcaaatctgtccatcctgaaaaataataaagcaaaggcaatccggttttccactctggaggcgatctgtaaagctctggactgccagccgggagatatattaagttatgaacaagaggaaggagaggatgagaatggacgataagatgtatttgaccgcaacagcccagggggaagtaaaggtcacagggggacgggcagaggagaaattaggcgcacgtctgcagcggattggaaaggagtttggatttttcggcgttctcagcattttttatggtgtaagcgccagcttctgcctgtttcggaatcctctggggattacagtccctttgtttgtggcggtgacctatggggctgcatttctgatattcagaaaaatgggggtgcccatcaagaaggattcttatttgctggcagccgtatcccttttgattgggctttccgcctgttttacgggtaatatggcagttggttattatatgaaccgtctggctctgattttgctgttctgtattttcatccttcaccagtgccatcaggataataagtggaatataggaaaatacatggcttccattgttctgtatctggctcaggccgtgggaatggttctctaccccttccgccatttaggggaatatatactgtcccttaaggataaacggagccgtaatgtgttccggctgctggcaggcgcctgtgcggctgtaccggctgtcatattcctgtgtgtgctcttgtctggggctgatatggtattcaggaacatgctgtcagttgtcatttcaaagttcctcaatccggttaccctgttcatggtggtgatccagaccgtattctggtcactggccatgtactgcctggtctgcagcgcctatggaggaagcatcagcgacgggatggtcaatgtacgcaggcattcgccggtggcagcggtcagcttcatggccatggtgggtttggtttatctggtattctgtgtcatccagattgtgtatctttttatgggaaagggcagcctgccggaggggatgacctattcccagtacgccagacagggatttttccagcttctctttgtggctgtcctgaaccttgtgatggtgctcatgtgtcttaagtattttcgggaacatgtgctgttaaatggatttctgcttctggtcagcctctgtacctatgtgatgctggcatccgccgcgtacagaatggtgttatatgtacagcagtaccagctgacatttctcagaatcctggttctatggtttttggccatgctgtttgtgctcatggcaggggtggtaattcttattttcaatcatgagtttcctctgttccggttctgcctggctgtggtatcctccttttatctggtatttgcctggatgaggccggactatataacagcccgctataatgtggcgcacagggacagcattgccggggtggagcagagcgactttatgcgcctttccacagatgccgcaccggccctggagggaatggaggattccgaaataaaggagcgccttctgtcctggtatgccaaaagatacgaggtttgggatgatgggaaccccatgggactcaggacctttaatttttcagtactgaaagccagaaataaactctgagaatttctctatgaatcccatggtttttcatgtatactatgaaaagaaaaacgcggatgatatggagctgacaatatgaaaatagcagtgatgggatacagcggtgcggggaaatccacactggctaagaaactgggcaggctctacgactgcccggttctgtatttggacaggatacaatttgagcccggatggaaagagaggaaccgggaagaagcaaagcgtatggcagaggaatttctgaatgataatcaggacacgggctggattattgacggaaactacgctaaattctgccaggaacggcgtctggaggaagcggatctcattgtattcatggactataccagaagaatctgcctgtggcaggcggtgaaacggtatctggaatacagggataaaaccagggagagcatggcagagggctgccgggagaagattgactgggaatttgtgaaatggattctccgtgacgggagggatgagaaccacagctatcggtccattaaagccagatatccccataagacgctggtggtccgcaaccggaaacagctgaaggacagcatgacaaggctgatattgagaagccgtgagaggacattgggatgagacaggaagaacttctgattaaccgcctggccgcatatgccaggtcggacatgtatcccttccatatgccggggcataagcgcaggacggggccggaggattcctttatgaactcctgcgtggactcctttacaaatccctttgcagtggatataacggagattgaggggtttgataatcttcaccatccagagggcattttaaaggattccatgaaatgggcggcagatgtctacggtgcggaccagacctattatatgattaatggaagtaccggcgggatactggcagcagtatgcggatccgttcccagaggcgggagaatcctggtgagcaggaactgccataaatccgtgtaccacggaatctgtctgaatcagttgaaaacctcttatgtttatccacaggagatagaaggattggggatacagggaggaattacggctgaagatgtggacaggatgcttaaccggtatatggatacacaggccgtacttatcgtatgtccgacctatgacggaattgtatccgatatagaggccattgcccggattgtacacagggccgggcttccgttgattgtggatgaggcccacggcgcccatttccggtatgacgccatgtttcctgtgtctgccctggacctgggagcagatgtggtgattcagagcgtccacaagacccttcccagcctgacccagacagccctgctccatattaaatgcaaccggccggacggaggatgctatgcagacagggagcggattgaccggtatatccatatggtgcagagcagcagcccttcttatgtgctaatggccagtatagagaacagtatataccagatggaacagacggatatggcgccctatgggaaacagcttcacaagctgcgccggagactgggtcagatgaggcatcttcgtcttgcggatacagggcttataggacaggccggaatcagggacctggatatctccaaaatcgtggtgtctaccaggggaacctgcctgtatccggcagaagatggattgaccggatttacaggcgcgcagctggatgacattctgcgcagagaatatcacctggagatggagatgtgcggggcagattacgtgacagccattaccacggttatggacagcggggaaggcctggagcggctgggggatgcattgaccaggattgacagccaactgacggatgccggttataaaccagacgggcgcagcgggaaccagaaaagtgtatacagtatgcggtgcgacacggccatgtccatgggagaagccatggaggagaaaatggcgtctgtcggtctggaggacagcgcagggtgtatttccggggagtttgtctatatttatccgccgggtatccccattgtggctcccggggaatggatcagcagacccattctggaagtgatcctggaatacagggataaggggcttccggtacaggggcctgcggaccaatccctaaggaccatccgggttgtgcagaaggattgattttatattaagacggaatgagaactgactgagattagaaagtgcagagagaatcatgggaaagatattttatgtcatgggcaagagtgcctcgggaaaagataccatatataagaagctccacagcagaatgccggaacttaagacagttaccatgtataccaccagacccatacgggacggagaacacaatggggtggagtatttttttgtggacccctcctatctggaccagtgcaggaaagatggtattttaattgaatgccggacgtatgacacggtatacggcccgtggagttattttacagcggacgatgggcagatcgatctgaaaacaggcaattatctgattatgggcactctggaatcctacgggaagatgcgtgcttattatggagaggaagcccttgtccctatctatattcatgtagaggatggattgaggctgcgccgggctttggaacgggagcagcagcagaccgtgcctaagtataaggaaatgtgcaggcgttttctggcagatgaggaggatttcagccccagccatctggaacagagcaatataacaaggcagtatgaaaatgtagtgctggaggattgtctcagggaaattgtgcaggagattgggagagtttgccatacgcaatcaaatgcaggacagccggaagttcaggacatctgaagccggatattataaaatacgtgctgtgaaagccaactggattcggctttcgcagcacgttatttttgtatgaaaaattattatgtaaagaatcagtgcgccacctggcctcagatactgtgcaccggcttctggggtcttccggtctgcggattctccagattatattcattaatcttattaaacagctgcctggcgctgatgcccagcttataggcggtggctgatatgttccaccccatctggttaagtacccactgaaggtactccctctcgctgcggcgcttgaattcccgccaggggacgattcctgcctgggtaaaggcggtggaaggactgtcgtcatctgttgtcttcagattatagagaatcggtattccttccgtggtgatgacatggttcttggagaggaccaccatccggtccacatggttcctcagctccctgatgttgcccggataatcataattaataagaaaatcccaggccttctcgtcgatgctgtcgattctgatttggtttacccgctgggattcctccaggaagaagtgaatcatgtccaccaggtcctccttcctctccttgagggcggggatgcggatgacaatggtactgatacggtaaaagaaatcttcgcggaacgtactgttgcggaccttggccaccaggtcgcggttggtggcggttatcagccggaaatccagctgcttgctgttgttgccgccgattcgctcgattctctttgtctcaatggcccgcagaagctttacctgggtggtcaggttgatgtcgcccacttcatctaagaacagggtgctcttatcagccagctcgaattttccggcccttcccttgatggcgcctgtaaacgcgccctgttcatggccgaacagttctgcttccagaagggattccgtataggcattacagttgaccgctatgagcggcatatcggaacggcggctgcaggcatggatatactgtgcagccacatccttgccggaaccggattcaccgataaggaggacgtttacattggaagctgccacacgttcacagtcttccaatgccctccggtaggcaggggattttgtgttgaaaaaaaacttttttttcatatcgttttcgtccataagcgtgtctcctgtacttgatttttaaaaaattattaattatgcataaaattgagaaaaaa

SEQ ID NO: 3153 - DNA, 209801 bp, Unknown
  gut microbiota DNA sequence
tattgtatataatacaggcccgggaagcaaattcatttccctttcgtttcccttacattttacacaggattgcatactctgttcaaatagtatatccttagttataagcagcagtgcttatactgcaccatataaaaatatgattcatgggaggaaataaaattgaagcaggcattgatcatcggttccactgtggcggacgtgaccgtcagactgccccatctgcccgttaccggcgaggatgtgattgtggagagccagtccatgtccctgggaggatgcgcctataatgtgtcggaaatcctccgccagtccggtgtcccatacaccctgttttctccagttgggacagggatttacggcaactatgtaagggaacatctaaaacggaagcagattcccattctcatccccgcgcctgcggcagataacggctgctgttactgttttgtggaagaatcaggtgagcggacctttgcggcccttcacggcgcggaataccgttttgaaaggcagtggttcagcctggcagaatccctgtccgtgggatctgtctatgtgtgcgggctggaactggaggaggatacagggggcttcatactggattacctggaagagcacccggaatacactgtatactttgcgccgggtcccagaatcagcttcatcccccaaagcagtctaaggcgcatgttttccctgtctcccatcctgcatctcaatagagatgaagccctggaatatacaggcaccacaggaagccctgagaataaaaaaccgtggaaaaaagcggacctcccctgccgggaatacaggttagaagcatgtctgccggaggctgcctcccgtcttacagcccttacccgcaatcatgtcatcatcaccctgggagcccatggcgcgttccatatggagccttcgggaaagcatgccttgattcccggctgtccggcacggcaggtggatgccaccggggccggggacagccacatgggtgcagtgattgcatgccgcatgaagggttttcccatggacaaagccatccgcacagccaaccgtatatctgccgctgtggtggaacacgccggagccgggctggacgatgaggattttctgcgcctgaatgcctgagatgctttgattgcctgggatgctttgattgcctgggatgcttcgattgcccggggtgcttcgattgcctgggatgcttcgattgcctgggatgttttggaagaaaattgtaaagatacgtaataggtttgaaattgaactacgctatctcatggaatataataaaaatggaatataataaaatcatggcaggaaccactgcggcccaagcagcctcatggttccggggagaaatgtttgaggaggaaaagaatatgatgaccagagattggaatgcccgcggcacaaaggcctgcgtccggcctgttctgcgctgtttgttccttctcatgatattcactgttttcatgggaattacggcatttgcagctgcagaaaaaattgacacggtaaaattatcattcacatgcgatcctgtcccaaaagcaggagaagcaccggggaccgtgactgccaagaccggcagcagggagttcaccgtaaaaagcactgagtataccaatgatgtggaggtatggagcctgggagacaaacccagggtcagggtggttctggaggcggcagacggataccgtttctcctacaccacatccagccatttcaagctcagcggacgcggcgcggattttatcaaggccaagatatccgacagcggcagcaccctgaacctggagtgctatctcagccaggcagacggaaaacccggtaaaatacagggactggactggagcggattccgcgccagatgggataaggcagaagaagatataaagcattatgaagtccgcctgtaccgcaacaggaatcttgtgaccactgtcactgcttccggcacctcttatgacttccgaaatgaaatcacccgggccggcgattacaccttccgggtgcggaccattgcccggtatgcggacagagccggggactggtctgagtattccgatgaaaatacggtcacggaacgccaggtttcaagcaatggaaacggctcctggatccagaaccagtatggctggtggtacagatactatgatgggggatacccttctaatacctgggaaaaaatcaataatacatggtattatttcaacagggacgggtacatgctgaacggatggcagcaaataagcggctcctggtattatcttggcgcaaacggagccatgacccgtggctggcagtctgtcaacggacgctggtactatatgaacggcgacggcgtcatgctcaccgggtggcagtatctcggcggacgctggtatttcctggacggcagcggcgccatgctcaccggatggcagtttatcaacggacgctggtatttcctggacagcagcggcgccatgctcaccggatggcagtttatcaacggggcctggtatttcctggacggcagcggcgccatgcttaccgggtggcagttcatcaacggacactggtattacatgaatgacagcggcatcatgctcaccgggtggcagttcatcaacggggcctggtactacctggatggcagcggcgccatgtatgcagaccagacaacaccggacggttattatgtggacggcagcggaaagcggaattagtatataccaaaggcagttgtaaacaaaaccgcacagcttcagggcgccccggagagaacctgttttactctccgggacgccctgtacattttactccccacaggacgcctcccgctgtgcctgcaaagctgcagaacaaacacaataacagcctgctcttcatctgcgccagccaccagacatccccagcctcccccacggccgccatatcagaacgcagttcctctattttcccggaccagaattcaaaatcagaccatctgctgggaatcaaatcaggaggtatcttaagctccagcttccatgccaggaataagcccgccaaaaaaaatacggcagccaggatgaatgcctttgccctcgtctttgccctcatctttgctcccgcctttgccccccttcttcccatcaggacggagagcgcccataccgaagttatccacaggggcagacacgctccaaggccggcggcagcggaaacatacgctccgtccaccaggaccttgccggacttaatctcattcctgtaaagaaaatttaccgctgctgcttttcctgtctccatcccatgggatgtcccttcctcccccgtacgcccttctccgctccttgcgtatgtaaacatcatataccgcatggcgtctttgtccttggcaggcagcagtatgacatgggatgagtcatctgtgactccccgtatcttgtaaggtttctgcctgcaccagatgtattttcccgctacatccagacctccgaacagttccatggccagaccgctgctgataaggcatccgtcctggtccgagcggtagccgtatgttcctccaatcagcctggaatatgacgccatttccatgagtccgtatacagcgatgcagtccgcctccccggaccttcccagtccggggttcattaccttcagcctttttgcacgggaccatgctgtgatttcaggcagcatattcctgccttgttcctgttcactgtccagtgcatgggtaatcagctgtttctctaccgcgtccccttccccaaagtacatgaatacatggcagccggcatccctcatggtccaggccaggatggtcccaaagccccataaggcggcaatgagtataagtatgatccattttttcattcttccaccaccctgacccggtctccttcactcactggtttgctggattctgtaatcagcttcatatcctttgtcacaggacctgacacagcagcggcagaactgctcttttccagtacatccacctggattctcaccgccttttgttcgtcacccagtatggttttttccggctctgcagccagacagtaatatcctttattatcctcacgcagtgcctcaatgggaatgacacaagggtatgccccggactccatgttcacggtaaaggataccaggtctcccagccttccctcgccttcctgtatccaggctgttacctggattttcccgccctctgccatctggtccacggattccacttctgtttccacattctttgactgtcccgccatcttcacctgcatcatgacaccctttttcagaagacctgccccggctgtctccttgtcaatctgtgccctcatctccaggcctcccacagccagcctgagctggtgtccgtcctgtatcctgtcccctgcctgtaatccggtatccactacaaccccatccaccggtgccttgatttgtcctttgttatctatgaattgctctatctttcccagctttttctgaatttcctccatgtcaagcttcatggactcctgtttcagaccggacatctcccttccggcagcttcccctgccgctgtaccggcatccgataccctcgcattttccaccttttccatggcctgatacaggacttcctccaaatcctgaacctttcttccagcttccttaagcttctcatcctcagcctttaatgcatcctcatacgcctttagcaagtcgtcctgattttccctttccccgtaatccacatcctcataatcttcctcggccgcatacatttttgccctggcctcctccaccttcaggtcctcttcctcccggatgtcctccaaatcctcccccgctctctcaagttccagctcagcccgttccagctcttcatcggaccccccttgctcctccaaacggtccagttttttctgtttatcctccacctcccgctccgcctttctcacagcagaatccctggatttctgggctgactcatatgatcttctggcacttttcatggccttgcggttatcctccttcacctgttccctggttctgttctttttctgcacataatcgtgttccagctcaatggatgcctgctcatggtcctccttcgcctccgcaaaatcctggtttcccagctccagggctctctgggcagcggccagctgctgcagagccagggtctcttcagtcacccgcggcactgaggcaagggacatctgttcctgtttcagcgccagctctgcctttttgtattccagggacagggcgtcgcgctcctcctcaagtccttccatctgaagggtcaggaccgtgtctcctgccttaacggattgtccgggcctggctgcaatttcctccacctgcatattctccggcagtgatatgtataccgttcttccggcagtaagctctccctctccctgtattgtgtagagaaccacatcctgctttccaaaccctgtattcacccgtatgacggtaaaggagtccatggctctggacagaaaggtcagggcagccatgagggccaggaatatggccgctgcttttttcacgttcattgactctcactccttgattcctgatgcggcaatcccctgctccagcgtctcctgtcccataaggaacaaaagaacaggaagcaccatcataatgaccgaggcagaccaggcagcacctgccttatcagccgtaatgtccggcaggtaaagggacagcggccagagtctctgctcctttaaaaatgtcatgggctgttcaatggcattccagtattccaggaatcccagcaccagcattgaaatgattcccggccgtcccaccggtattcctaccttcataaatatagaaaagtcaccggctccgtccagcctggccgcctctatgagaggcgttgggatggatgcaaagaattttgtcatgataaagacgggaaaagcggaaaagattcccggcagaatgacagccagatgggtatttaaaagatggaaccgcttaaggaccagataactcgggaccatggtcacctgaaagggctgcatcatgagaatgatatagaaaagaaacaatgccctctttccgggaaaacagaaatgggcaaaggcccaggcgcccggaagggctataagcagctgccctgccagcaccagcccggtctgcagacaggaattccaaaacataacataaaatcccggtgaatccaaaagcagctccacaaaggggctcagggttgggtaggagggaataaaagctgcctttatgggagcgtttcccatgccaaagacagcaccgaaacgttccagcatttccccttcggacatcagcgcgctgcctgccatgagtaaaaggggaagccatataaaaagacacagcaaaacgaggaccgcatgtattaaaatacgttttatcatctctttttccttttccaggtccacagcagcaccggaatcataatggatacctccaccatcacggatgccgcgctcatcttctgaatgtccagggatacgaaccaatggttgaacaggtgctggagcatatagatactctcatgtgggtaatcccctgatatcaggtatgcctccctgaacaccttaaaggaattgataacagacaacaccagcaccagaaaggccgtacttttcagccccggcagagcaatatggaaaaagctctgccaggaaccggctccgtccacctttgctgcctcaaaaagctcttttggaattccgtccagtccggccagccagagcatcatatcgtagcctgtgtttttccatatataggtcaataccaggatataaaaagcacttccctgattcagccagtcctggctgctcccgcctgcccataccaccatctggtcaagaatcccctggggataaaacaacagcttccacaacagtacaacggaggccaccggtatggccattggaagcagaatggttgttttatacaggctccggctgtccgcagctcccgtcataaggatggaaacccacagtgaaaaggccatcagcacagggatgcacaccaggataaaatgcagggtattctttacagccagccggaatgcctggctgtgaaagacctgtataaaattctccattcccacaaactgtccgcccactgcctgaaaaaaggagcggaccaccacattcacaaagggtatgagcacaaatacggctgtccccgccaaacttggggccaggaacagccatggcctcagattcctgagataaatgccaaatcggttcccggaagattgatttatagcttttctactccgaaaaatacagcattgccttgttctgcgcattctgagccgcctgttccagggacaatctcccctcaaaatatccctttgtctcattgatgataatatccgtcaaaacccggtccatccgaatggggtgatccgcctttgccgccacatcaaacaccagctggcgttcttcctttgtaggccagctgccggtcagctcgtaaccgtcatctccgctgactgcaacggatgtatccttattatcttcccgatccacccagtcccggactgccagggtattgaccggaaggccatctgaaaggtcctttgactggacgtcgcgtcccagcacaaagagaatgaattcccttgccatctccttattttggcaggcctggttgattcccatggtgcctgagggcaggtaggaggcgtttacattttccatggtaaatccgtgttttctctgtactgccagaggcagcaggatattgtacatgccatctatcttgtcgattgcaacggcactcatcccctggtccacacggctatattcgctgcccaaaagtccgtccaatcccggcataaggttatagacattgccccgtcccccatcctcggatttatcaaaggcagacttggcgccatttgcctctcccaggaccttcactgtctccagcagctccttaattttatccggatacggctttcctgtccgcatatccacgacttcatcgtaccgcagcatcagtatctggcgcagcagactttcataattggttttgggccgcaggggaagatgggacggatcctcctggtaggccctcatggcttccatggacaccaggctggctgcggcctggctgtccccataggcagccagcagcgtcatcctggtgggaatctggtaaatactcccgctttcctctgtataaggctttgacacctgctctgtcagctctcccgaagctatcatggggcttaagaaatccttcatatcctcaagaatccccttttctatataggattccgccgggagaccgtcaagaaccagcaggtctgccccatttccgcctaaaagctctgtattgagagctcttatggtatcagataccgtggtgctgcccgacgtgatctggccgtcaatcaattccaccctgacatccgggtgttccagctggaacatagatgcagcctggtgaatggtatctgtctgttccaggttcagcccatatacagtcagcgtctgggtgggcacggaaggcctctgagggtcataggtataatgcttcagctcttccttgtcatcctgggacatccagacataaaaatcattctggtttcccgcaaacagcttcctgagattggcgcttggaaggctcagggaattaagggtgccgtcagcaacagtctcccacaggcttcccccctggttcatatggtggattccccggggattggcaatgtatattcccccgctgccgtccgatgccatgggggcccacatgtcaaaatctggtgactgaaatggtatctcctctttggcggacgccgacatgccggaaatatcgtagctgatataggagctttcgctgtacgtgatataccggtttcccttgagcaggcctgttcccttccattccatggaactccactgctggggcagtgaaagaaccagttctccttcaggcgtgtacacatccgtcaccctgctgtgagacaggaaaataagtccctcctcggacaccgccgcaaaatcaggcctcacatcgtaatatccctggtcatttttaacggaaaacaccgggtccaaaagcatcatgggttcctgtccctctgtcagcttcatcatatatgtcttataatcatccccgccctggtacagcacataccggtttttgtcctctccccatatcatatgcagggtcccgtacggaaactccagtccctccagcaggctgttgtcctgtttctcccacttttcacccgtccatatgtatctggaagcttttttgtctttgaccgtatacagctccagaacctggtcccctgtctggatgatatcggcggctgtctccccttcttccagggaaatgcttatactgctctccgcatatctccccatcggtccctcctgctgcttttcctcctgtgtctttgattttgtctgctgttcacctgtgctgccgcctgctgtaccggacggcgcagcgcagccccacaaacatcctgacagtatgctgacagccagacacaggctcataagtttatttttcattgtcatttctcctcccggacaatcttcatgtcccctgtatcataccagacaaatctctaaaaaaacttaaaatttggaagaatttcttttaggttttttagagatttgtctgatataatggttttatatatcaataacaatgaggatggtacaatgcggattctattggttgaagatgataaggaattatgtgacgccataaagctccagctggagcgggcgggatacgagactgactgctgcggccaggggcaggaagccttttattatgcatcggaatacccctacgatgtgatcatactggaccggatgcttccccagatggacgggcttggcgtcctgggcggcttaaggagaatgaatattaccacaccggtcatcatcaccactgccctggacggcatcaacgacaggattgacggcctggacgcaggcgccgacgattatctggtgaagccttatgctgccggggaactgcttgccagaatccgggcccttaccaggcggccgggaaattttaagcagagtccctcggccgcctgctccaacatcagcctggatccggagaaaagggagctcacaggacccctgggaaccctgcagctgagcaaacgcgaatccgccctgatggaatacctgattcgcaataagggccaggtcctccccagggggctgattctctcttacatatggggtcctgactcagatgtggaggaggggaatctggacaactatatctattttctgagacgtcgtctcaaatccataggagccctgccccagattaagacggtccacggaatcggataccgcctggaaatcggagggacccatgattaagcagctccggcggcagcttaccgccctttttaccattaccaccggactgattctgaccctggtggtcatcggcatcctggtcataagcgccagggaattcaataaaaaaaccctggactcctttcagaaccaaatcctgaacatcacctcacggctccagtccggctccaccgtcagctgtacctggctgtccaggctggaaagcgataaccgcctgattatacatatcgaggacaacggcaggcctcttctctaccacggttcctggactccggacaccaggcgggacaccttaatcatgcgggccagggaagctgccatggccgagcgcattgacccgtcatcaaggccggtatcctcatctcttctcagaagctctgtatttacagtgacaggagacagcaatgacacctatctgggcagcgtgcttgttcttcccacgcagacaggatttcagagtcttacactgctggccagcaaggactccatgggattcggcctgttccgtcagggtatcctgttccttcttctcaatctggctggtatcgccgcgctgatgtgcgtcagctggatattggtggggaagtccttaaaaccgttggcagaaagccagaaacagcagaatgaattcatagcggcggcatcccatgagctgcgggctccccttgccgtcatccgctccagcatatgcgctgcacggacagctcctgaccagagagaaaaattcatggctaatatagaccgggaatgttcccgcatgtcctgtctggtgggggacatgctgcttctggcctcggccgacaccggacagtggagtctcaggacctcctccctggacatggatacccttctaatcagtatctacgaacggtttgaaccgctgtaccaggacaagggcgtctgcctgaagctggacctgcccgaagcctcacttcccaggatatacggcgatgaaaaccgcctggaacagatttttgccgtcctcctggacaatgccctgcgctacacgccaaaaggacgcagtgtcactgttgccgcatccgtacagacagataagcatctgctctcccgcagccggagcatagtctgcctcaccgtgtcagatcagggcagcggcatggatgacgagaccaagaagcatatatttaaccggttctaccggggagacagcgccagaagccacaagcagaattacggattggggctcagtattgcaaaggagctggtacagctccacaaaggcaccataagcgtgtcggattcaccggacggaggcgcctgtttcctggtccgtctgcccgccgtacccgaatctcacgcttccagcaggtaacggtccactgcctcggcgcagccgtcgtggtcattgtcagccaccaccacatcgcacagttcctttatgtgcggcagggcattgcccatggcaacagagagaccggcaatccgaagcacctgggcgtcattatcggcatctcccacaatgatggtcttatgaagcggtatgtccagatgtccgcacagccacaccaggccgctggccttactgacattacggggggacagctccagggaagcgccttccgcaaaggcaatagcaaggggaagcccgcatatcctggaatgaagccgttcccggatgtcagcggaggcggaaaacaggttcagcttctccaccgggaagggatgtttcctgtaaagggccccaatgtcatccgtcttattcactacccggtccatcatctcctggtagacgcccatatggtaatggctggtatccgccacctggcttgcgtttgccagagcctgtccgccgctcatcatgtataccatcacatcctcatgggcagctgtttcaagaacctgttccaccaaatcccggggcagggtctctgaatggaggatgctctggttcaccgcgtcataaatcagggcgccgctttcgcatacatagtggctgacattggcaaggacatccctgaattcctccagctcgctgatacagcggccggtggataatatgacgcgttttcccatacgggcggcgcggtttacggcttcaagcgtacggtgtgatatggtcttttggctgttcagtatggtgccgtccatatcaaaaccaattaattcatagtgactcatgaaggttcctctttcatttccatttttctctcctaaagaatacaccccatttcccaaagtatcaataacaaaatcacagcttccctcatgttttttcccattcccctttctcatggaatcgtaagaatttttcagcttttcttcaagtcttatggagctgattgtattatattggttgtatggaagtatgatggtccggaaatatgattggcctttattggcaggaagggagcgtttcatgaaagaaaaacacagattgattcctgtattgattttcgcatttattttgactgtcctgtgcacggctgccgtatcacgttggtacctgctgcatcagaaaggcggtacctataactccattctcctgggaaagttggtttccagcgacggcaggaagctggttttacagggaaatatcacaaatccccaaggcaggaacggacagtatgccatcacatacagccccggtataaccgcggctgacaaaaccaaggattctcatataacaccgcccaccgccatcccgcagctccttgtcacatacggaccggacaaaacggaaattccttctttttcaggaggatatcaattatatacgccggatgatgaggggacagcagaggctgtcattgcctgcggagccgaacctctctcctatctggtcggaaaggtgccggacattccctacgtcaaattggggacagatatttccctggatttcagggaaggcactgtcccagattcggtcacggttcaggacctcatactccgcggcgacggctccccgaaatacacggaacaggtcacagaggaattcaccctggcctgttccggcagcgcggcctgttttaccctggatatcaacagcgcggctttactgagttctgatatgtcttcgtatgaagaagcaggtattttgagaggttttcgtgtaaactgccggtgggatgacaacagcacggcggaatacggctttgtcatccgcactgacgcttcatccacagaaatccgtaaccaggcagactgacaccggatgcttccatgagatctcctgtaaccatatccccatacattccgtccctttcatcaatccacgcagtacggcgttcgccgctgaaattaaagagaccgatgagttttttgcctctgccgtcctgccttaccatacccaggacagagttgtcccaagtctccaaggtgcggaaaggacacccggcatccaataggggttccccggcccgtatggcctccaattgttccagattatggaaaatacgattctggactgtttctggttcatttatccgttccaccagatcccattgaaattctcccctgtgtatataccgggagtccggtgccttttcgggattgtccttataggtgtagtcattgacctgtcccacctcgtccccgctgtaaagcacagggatgcccgactgaaacagcatgaacgcgtggagcatggtatccagcctgacagcctcctccatggcctgcctgtcatggcagaatcctgctttttccacaccgcacatggaggcggtggttccgcagaaccgggcgtcgcccgtggccgggtcgtcattgtacaggacgccccggctgaaactctccggtatccttcctgtaaagaaatcattcagaaatttcttatggggaacctgcctcatcccccacctttccaaaagaggataatccagtccccagcctatatcatcgtgacaccgcagataattgaggaaggtacaggcagagggcagggaactgaccgtctccatctggctttttaagagccttacatcctttgtggctgccgtgttccagatggccgccatggtggtcacattgtagagcatatgacattccggcttttccacggttccgaaataaggagccaccttctccggctccatgaccacctcccccagcagcaggataccgggacacacgatttcgccaatcatgcgcatcatcctgacaatggtgtggaccctgggaagattgcggcagtccgtccccaattccttccatatatagggaaccgcgtcaatcctcagcacatccaccccgcggtttgccaggtaaagaaaattgaacatcatctcattaaagacaacaggatttctgtaattcaggtcccactgataaggataaaaggtggtcatcacatactgccctgtttcaggcagacaagtgaagtttcccggcgccgtggcgggaaatacctggggcaccgtctcctcaaacatagagggaaccgtccagctgtcaaagaaaaaatatctgtcctgatattccttttcccctgcccttgcccttttcgcccacccatgatcctccgacgtatggttcatcacaaaatccaggcaaaggctgatgcctctgtcgtggcattcatgggccagctgctccaggtcctccatggttcccaaatcctccctcacctttctgaagtcagatacggcataaccgccgtccgaacgccccctgggggtatctaaaagaggcatcaggtggagataattcacatggcactgagcaatataatccagcttgccttccacgcccttcaggctgccggcaaaatgatccgcgtacatcatcatgcccagcatggagctctttctgtaccagcacgggtcctcctctctggcagcgtccagcgctctgagacaccctgcgcgctccttgtaaaacccttccattccctttaacagcccgtcaaacatatcctgactgttgtagagctccatatacagccatttcagttcgtccatatgcttatccagacgttttctgtagatgttatcgcgcttcatccccttcatatcctccttaaatgtacctggaacgcctggtattcccctgtcccggacggaatggggattccggccgacataaggcctgctcccggatattcggtccctgtatcctcatccctgtacatggcctcgggatccagcccctccaaaggaatatacaatgacagcggattgccgtgggtctccagagcaactgtatttaacagcgcctcccccttatcctcactcacaaagagccatgcggccgcttccctgtcctcaaagggattcgtcagccggtaatacgccccgtcatgaatcagatgccagtatttatggtacgcgtctatctgctccctcacgcaattcttgtcttcttccgatatggcgcttaaattcagctcatatccaaaacttcccgccatggcaaccactcccctggttttcatgggcgtaattctgcctgtctggtggtttggcactgctgatacatgggaacccactgcgctgattgggtagccaaaggaagttccgtactgaatccggatgcggtccaccgcatcggtgttgtcactgcaccagatttggggcgtgtaatacagcatgcctgcgtcaaaacgcccgccgccgccgctgcacccctcaatcagaaggtccggatagcgctttgtcagacgctccaggaagtcatagagtcccagcatataccggtacaaaatactgcccggactgtctccacccgccattttacctgccgcggaatatacgtccgctatgctgcggttcatatcccatttcagatattctatatgggcgctgtcaaggacccggcagatactgtcaaaaatataatccgccacctcttttcttgaaaaatccagcaccagctggcttctgccccggaccggctttcttccgggcacagcaaaggcccagtccggatgttccctgtaaagactgctgtcctcagacaccatctccggctccatccagattccgaatttcattcccaggccgttaatccggctaaccaggctgcccagggaaccgcccagcttttttacgtttacctgccagtctcccagaccggagcaatccgaatcccgctttccgaaccatccgtcgtccagcaccatcatttccacgcccagttcctttgcctgtcttgcgatatccagtatcttttctccggtaaaatcaaagtaggtggcttcccagttgttgatcagcacaggccggggaatggtcttgtactttcccctgcaaaggctgcggcgcatggccttatggatgctgcgcgacaatgtacccagcccatggccgctgtaccccatgataacctcaggcccaaagaaaatctccccaggtttaagctcataggaaaacatctcatcctgaagccccatagacatcctggtctgaccgtactggtccgtctccgcctctgccttaaaggccccgctgtacacaaaggacatgctgtaacaggggccatggttttcggttgtctcccgtcctgccagtatcagaaatggattatactggtggctggaagtccctctgcggcttcctatgacctgggcgccgtggcacagggcggttctctggaaattgcgctccattgcgtggcgtccgtaaaactgaatcagatcgtattccccgtgaaggaagtccagacatgcactgtatacccgtttcagggctgccgggccattcccttcatttttcacacagactgccctggtaataatgtcatatccggggaatacgccgtagagcaacgtaaccgccagtccgctgacctggtctgtcaggtgtatcttaaggctctctgcgtcctccaggccctccccatacatggaaggaaggcctggaaggctgtatttccctttgcttatttcatatcctccatagcgcagattcagcccataggatttgtcagcctgttccactgcaagggcagggcttctgaagtcccctgagccctgatgtggatattcctggggaagggcgtccagggaataggttctgtcatcacctgcctcatatggattgggtgagaacccccggtccccaaaggtaagcagatattccatggagccctctgtcctgtccccgtagtacaggtgaagcagattcccataggaatctgccttcatctgatatgtggagtggtccgtgtgaagggtgaatatccttccattttcctgatactgtattgccatgtgtcatcctccgtctctgttatccgtctctgttatccatctctgtttttcgtctctgttatccgtctctgtttttcgtctctgttatccgtctctgttttctatctttatctccatctctattttccgcctgtcattgcaattccttctataaactgcttctggaataccagatacagaatcaccatgggaaccatagccaggacagagcctgccatcagcaccggataattggtggtgaactgccctctcagggtagaaagaccggcagacaaggtcatcatgttcagatccgtgttggcaatcagaggccacatcagatctgcataagcgaacactgcagtgaagatggtaagggcagccatgctggccttggtcagaggcatcatgaccttggtaaaggtctgccacttggtgcagccgtccaggtatgcagcctcccccagctcatccggaatgcccatgtaagcctgcctgaggaaaaaggtgccgaacgcgctgactaaccccggaaataccagcgcaaacatgctgtttgtcagtcccattctggctaacatctggtactggggaataatgaatatctgggacggcagcatcatctgtacaatcaccagggagaacaaaaggttctttcccctgaatttaagctttgcaaatgcgaacccggctgctgaggaaaacgccactgcgcagagcacccgaaacagaatcagcagcgccgtattcacatacaatttcataaagggcagggaggcgatggctcgcaggtagttctccttcatccactgcttcggcaggatggtcggcggaatctgtacgctctcccctgccgacttaaagctggtgaacaccatccatataaacgggaatatcataagcagggctcccgctcccagggccgcatacacaagggcggtattaatactgcggtttgtctccaatgatttcatattttccctccatcctaaacttcatagttgacccacttcttctgtccccagaactgcagagctgtcacggctcctataagcagtacggtccacacaacaatggcggaagcatacccacggtttcctgccacaaaggactcacggtaaaagagatacatcagtgactgggcgtttgtaagggccggattagtctggtccaccatcatgtaaatcaggtcgtacaccttaagggatgccatgagccgcatgattaacaccacaaagagggtgggcgacaccatgggaagcgtaatcttaaaaaactgctgtattttggaagccccgtccaggctggcggcctcatagtagctctttgatatgttctgtattcctgacagcagcagaaccgcgtcatatcccacggcgctccagactgccaccaccgcacaggccggaagcaccagcttggggttggtcagccagtttatcctgcttccgatgatctggttgataatgccgtactctgcgttgaaaatccatttccacaccatggctatggctgccggcgcaaccaccatgggcaggaaataaatggctctgaaagcagcctttgcccgaatcttcgcattgagcagcacagcagtcagcagggaaaggaaaattcccaggggcacggtcagaatacagaagtaaatggaattccaggtggccttccaaaactccttgttcccaaacatctgcacataattttccactccgctgacctcatagtacccaaagggatgggtggtggaaaagctcagtaccagggtctgcaggaacggatacacgttcagcacaatcagacctattatcgtaggggcaatgagcagatagccccattttgcatcctctgtcaaatattgtttcttacccatcattctcctccagtcctgccatcattacggcgcctttgcttcatccaccagtttctgcatatcctccagtccctggtccagactcagctcaccgctgtatatctttaacagcaggtcgttaatctgggttttccagttgggtctggatgcattgttgacgctctgtacaccataaggaaacatatccacgcatttttggacatccaatttgtagtcatattggtcaaaggcgcttatccacgtatcctccagccccttgtaggccggtatggctgcgcctgacagcccctggaccctctgtccttcctcggaacctgcaaatttcaggaaatcccttgcgtattccagcttctttcccttggctccggtggaataacacaggccgttggatatggtggctctgccgtctccccggaccgggtccgggcacttgggaagcacggccacatcccattttccgatcatctccttgttattctccataaaggagataaggttccagtttccctccaggtacatggccccctgctctgacatgaatgcgttgcccggagccgtctcagcaaaatagttctgatcagggcaccacggctccttctgaaggccgatataaaattccatggccttccttgtgccggaatccagaaaccctgccctggtcttatcctcgttcagtatgtagcctcctgcctggtatacgaaattccagtatcccagctgctcatccgcatatgccatatatccgtattttccggttctttcataaatctgagccgaagccgacgtaaggtcatcccacgtccaggactcatcagggtaagccacccctgccgcatcaaacatctctttgttatataccaggcagaccgtatccttatccttgggaaccccatatatccgcccgtcggagcccctggcatttgccagcgaaatatctgaaaaatggctggtataataatccggctccacatcgtcatataaatccgtcacatcctccagttttccatagtccgcatatttaagaatctgattggtgtgcatccagaagatgtccggcagctgtcctgattctgccgccgcatccagcttggtccagtactcatcccagctggtaacctgaacctggatttccacctccgggttcttatccatataagccctggctactgcttccataccgcctctctgggcattgtcccaaatctggaagttcagatgcaccaatccatccgaggcccttgttccggagccgcatcctccaagcaaagcagcccccagcacggctgcggccgctgtgagaattccctttctgaacgttttaagcataatgtaccccctgtcatccctgttccttctattctaaaaccatccaatttgtcgccttcattccatccggatttctttgataactacatgatatcatgggttttaaggcaggtaaatattctgcttacacaaaaaatatacccaaatgctatttttatatctataacttgatataggctggcatttgggtatataatgataaaaagggggttttcaggcaatgagcaatgtactgttttctatatttcccaacgagcgcttcgtggatttggggttatatcaatacggctgggaacagtgtgaaccgctgcactcttatggtccctatgccaggaaccactatctgttccactactgcatatccggcacaggcaccctcatatccacggattccaaaggggaatcccacacctaccagataaaaagcggggaagggttcctgatttatcccaagcagatcaacacctactttgcagacaagaaccatccatgggagtacacctgggtggaatttgacggcctccgcgtaaaggaagccctggagctggcaggactgaccatggatgcccctgtataccattccaacgcccgtgacctaagcctggatctgaaaaatgaaatgctctacattgccaggcactccgaccagtcgcccttccacctgattggccacctttatctgttcctggactatctgacccgctcatctgcctcccgcaggctgttaaagacaggccgtctccaggacttttatatccgtgaggccacatccttcattgagcagaacttccagaacgacatatcggtggaggacattgccgctttctgcaatctgaaccgcagctacttcggcaaaatcttccgcgacgcagtgggtaagagtcctcaggaatttcttatcagctaccgcatgaccaaggccgccgaactgctaaagcttacggagctgagcataaacgacatcagcaatgctgtgggttatcccaaccagctccatttttcccgcgcttttaaaaaaacatacggcatcccgccccgccagtggcgccaggaaaacaagatggctccggccacctagggccaggagtatttactgccgtatgatatacagacatatggtatacagccgtatacttacagatacttctcctcatactcctccacgggtatgggcctgctgaacaggtatccctgggctgtctccaccccgcaggtacgaagcacggacatctgctcctctgtctcgattccctctgccaccacccggattcccatttttttgcagattcccgctatggactcaatgatggcctgggccttggggttattgaccatgtcgtccaccatggtcttatctaatttgagcacgtcgaattccactgaggataacagggacagattcacatactctgttccaaaatcatccagggcaactgtaaatcctgcctggcgcagtttccctatgagctcctttaagtcaatttccggcgcgttccgtatgctctctgttatctcgatttccagcagtcccggagagattccatatttatcacacagcttcaccagctgttccacaaaggagggttgggccagggaaaacctggaaaagttcactgaaacaggaaatgcctgcttctcccggtcagcccactcctttaccttggaacagataaattcaaagacaaagaagtccacctggctgatggtctgggcttcctccagaaggggcaggaaattgcccggcagcaccatggacccttccttggactgatatcgtatcagcgcctctgcccccaccgcggaccggtccgcagaggaaacctttggctgcacatagaccacaaaatgattctttcccagttcgtctgccagtacctccgggttggacagattgattacctcgtcgctctggtgcctgtagcgccgggacacaggactccggcggtaaaattctttcttatcctcatacatccttgcatctgcatccgcaataatttgggacaaatcatcgcttccctctgcccagcggctgcccacggctgccctgcatatggaatcccgctcaaaattcttcctgagcagctccaccttttcctcaaatacttccttgctccattcccggcagatgatgacaaattcatccccgccgattcggtagaaatcagctccatcaaacgtctcccgcatcctcctggcgcattccaccagtaccttatctccaaatgcgtggcctctcaaatcattgatatccttcaggccgttgacatccagatatacgatgcccaccggggaatccgtaactctcaggttatccgtatcggcagtataccggttgcggttgtagaaggaggtcagggtgtcatgatagctgagcctgtttaattccttttcattctcatccctgcggtaggacagcataaggaaataacccagcgtgcgcagaagggggccgatattgaccagctgttccaaaggtggattatccactccaatggcaccgcagaaatgaccgtcccgttccagaggcgccgccaccagactggtgatcccctgggccgttaaaatctcatactcattcctgtagttctccttcagatcctgcacatcctctaacaccatacattcctgccggtcaaagattttaagccaccggtcgatgaattccagaggcaggccctgcagtgtatccatctgggattccacaccctcggcgcaccactcgtattcattgtacagcttaccatccctcagcatgaatacataagaccggtccgcgttcatgaaccgtcccagtttatcaaggatgacggttagcgtatccccgatgcccctgtcctcataaaggctgcgcacacagtccaccagcatatcctctgcgcgaagggcaaacttaaggctctgtttctccttttccgcttccgtcacatcaaaggcaatctccagacgggccggcctgtcattccattcgatcaggcggtcctttaacagataatggcggcctgttatgggattggtattctcccacgtaacaatattaccgtaatccgtaaaatgctcactgcagaacggacatggctcactgagcccatggaatacctcataacagcgctttccttcaatggaatccagatgaaaatttctcatcccggcctcattcagaaacagcagctcatgggtctccacatccgagacatacatcatctcggatatatcgttgaggggcgcgcgaagcgtatcccacatacggtccagacgctgcttctgctgccggttagcattttccttttcccgtataacggcctgcatcttatcctgcctgcgctcctgccataccaggattccccacacacccatggcgccaagtatcagaattccgaatcccctgctggtgcggttcacctgtttctcagtatactgctccgccgctgtcacggttgtatccgccagctggaaataacgctcgctgagttcaaacagctcttctgaatccttcccctgcctcaccagcatgatttcttctttaagcacctgccactggtcctccatggatgacagcagctcctggtaggcctgatcattcaaacggatgaggcggttttcccccaccccggtggccagctcctccataatgccgtccaaacgcgcaataagggcgtcatccgtccgccctttcaattcttcctttacaaggcgttgggtggcgcctctgacaacacctgtatagttaatgaccctggcatttccctggagattgtgtatggacacaagggacaggcctcccagtcccaccagggacaggaaaagaacaataggaatcagtcttttcttcatacgtaccatccttcataaccggatgctctccggcactttcatatcttaagtataacacttaatttcattaaatccagcaggattttactatttattctaattgttaccacaggggtgacttccttctgaaaatgttatataatattgggtatcaaagcaatgcggagaacagatatggatttaatcaaccagttcatagagaattacaagaaaaagatgaacttttatgaaacagccggccggatggctgcccggcagttagagagcgcccttcaggcagccggtatacgggccatcgtgacctcccgcgcaaaagccccggggcgtctgaaaagcaaggtcctcatacgcaattccaggcgggcggtcccctataaaaacatgcgtgaaatatacgaggatatcgcagatctgtgcggtgtcagggtgtcactgtacttccccggtgaccgcgacaaggcggacagccttatcaacgaccttttcacccttctggagaccaagcagtttccggaacagtccaaggcgccttcttataataagcgtttttccggttactgggccaaccactaccgggctcatatgagggaggaatccctggaccgttcccagaaaaagtataccacggcccgcattgagatacaggtggcttcggtccttatgcacgcctggtccgaggtggagcacgatctggtctacaagcccctgcagggaaccctgtccgatgaggagctggcgattctggacgagctgaacggcctggtccttgccggggaaattgccctggagcgcttgcagaacgcgggcaatgagcgcatacggaacaaaaatgcagagttcggttcccagtacgagctggcttcctacctgtataattatctcagcaacaatttccgtcccgaggacatagagctgcgcatggggaatattgagctgctgttcaaactcagcagccgcctgaaaataaacagcgtaaaagagctggagccagtactcaaatccgtgaaattcgagaaggaccggcgcaacatttcccagcagatcattgaccagatgattacgggcagtgaaaagcgttaccatatttaccaggagctgcgggccggccaggacggcataggcgaggacgagcgccatgctgtggaatattttttcagccagtgggttcccctggaacagctgcttaaccgcgtctcctccaaaaactcccccaaggtgcggggagccttcaatatcaacatcctgaagcggctgaatctgctggacaaggagtgcatcaaccagattgtatccctgcgcaagatccgcaatgtgctgattcacgatattgaaattccggaagcagattatatcaaccggcagggagacgaagcccagtccctgttccacaagctgtcggagcagtttgccgccccggcttaagatcaaaggttacttaaaccggctgcttttggcgtttttcgtggatggtaatggggcacaggcatccggggcgggccatggcggcgggcacaggccgtcatcatcccctcccccagaacctgcggatttcatcccggctcagccccagcgcaaactcctttttcagcaccaggaactgttccagttccagcagacccaggtacagtaaggcccggctctcaaattcctgcctgcggacaggaagaggctgggccttcatttgtaatttcacctgttcgagctcatccagcaatcccagggcattgttcctttcatggaaggaaccgcttacagattgaagcaggtccgccaccaccagcgcctggtccggtgtggactccattcttgaaaagcagtcccgcatcctgcaaaggatggcaaactggttcttcctcagccccatataggcaagataatagcgtgtgtccgccaaaagactgttctccatcccctcgtaggctctgcgttcgccctgctccaatgcctgccccaatgcctgttccagggcctgaaacccgcggccgtccggctgctccccattctctcccggtgtttccagctctgatgccatccggctcagcaggctgatgaacgtttcttcaatctccccctgtgcagagcgtatggctgtctccgatccgggaatatacaggttgagcacaacgcccactcccgtgcccacaaacagcagaagggcttcattggcaatatccgccattcccatggatccctcagccagaatatgggtcatcaggaccgtgttcacggatatcccctcctgtatgccccatttcatacacagcggggtaaacatcagaagaaaaatccccattgccaaaggccggtaccctgccaatgcaaaggataccggccccaggaccattgccgccaggaaagccagaaaccgcctgcctgtaacccgtatggtttcccgcttcgtatcctggatactgagcagggtaatcacaccggcagaggagctgtatctaaggcccagcgcctgggcagccgccatggccagcatgcttcccacggctatttttaggattttaagtaaacggccgtacctgtgcatatacacctcccggtcactttatgacccccattgtctgtcattatctgtcattgtctcccaattgaccggcatccatacaagccagggacggacgaggccggctgccagaccggcttataccccgccggaatgctctgccagcttatgctctgccggaatgctccgccagataagcatccagtatggccgctgccagtccaaccagctccttgcagaggcgcgactggtagtaggcttcggtcctgtcagacggtatgaagctgtcctttcccgttccctccaggcccagaagttcccggcacagcagcgttcccgtcctttccttttgcggctgtcatgtcctgacagccctgttcctgccggacagcagagaaccggctgtccgccggttctctgcctccggaattctccggaaaaatcacttgaaattatactcagttacaatcttctcacgcccggtggtcacatctgtaaaatactcatacaggcagattcccaggtaagaacccgatatattccacacattcctgtacccccggttcacaagggccatacacgcattatagcttctctggctggagcggcagtggagatacacagggcgatccctgggtatctcatccagacggtcccgaagctccgacaatgggatattgacggatgtctttaaatggcccaggccgtactcattcttttcgcgcacatctataatgcacgcgcctgtctccaccagctcccgcaccttcgtcacaggcacctgccgcactcttccatagagcaggttcagggccgccagggctgcctggtttaccacatccttggcagtgccgaataccggggaataacacagctccagctccttcaaatcctccagggtgcctcccatggaaatcatggccgcaatgacatctatcctcttatccgcatttccccgtccaatggcctgggctcccagaatctttcctgtgggatattcataaaccagcttaaagtgcaggggagcgcttcccggcataagccccaccttgtccgtgggtatgatatacacagaatcatggggaatgccggcttctgcggctgctttttcgttcagtccggtggccgctgcgttcaggtcaaagatacggaccgcacaggaaccaatgacccccttgttattatggggtatgccgtacatatggtctgccgctgccctggcctgtctctgggccggtcccgccagagccagtctggacggcttatgggtcagccggttaaacacctggatggcgtctcccaccgcatagatgtcagggtcactggtcctgtaattatgatccaccttaatggccccagtctctcccagctccagccccatatccttagcaagtccggtctcaggcgcaacaccgatggccagcacagtcatccctgccctgacagccttacccgaagccagggtaatgctgtcttccccgatggcgctgacaccgtcatttacaattacatccactccatggtccagcagctccttctggagcatctgaaccatatcataatcaaaaggcgccataatctggtcctgggcctcaatgacagatacatgccttccgtccatgttcagattctcggccacttcaatgccgatgaatcctcctcccaccacagccacatcccggatctggcagtcggtgacaaatttcttcaggttcacaatatccgtcacattccttacagtgaatacattgggcctgtccacgccctctatgctctttggacggatgggactcgcccccggagagaggaccaaaatatcataccgctcctcatagacatccccggtacacccgttttttacccggatggttttcttctccctgtccactgacagcacctcgctgtccgttctcgcctctatgtcatactgcttcttaaacttctccggactcatcataaccagggcatcgctgttctttaccgtgccgctgaggtagtaggggagggcgcagttggaaaatgacacatgatgacctctctcaaacatgataatttcagaccgggcatccagtctcctggccctggccgccacagacgcgccgcctgccacaccgccaacaatcaatattctcatttgctctgttccctttcttctgatataattctctcaaaacatgcatccgcaatgtccgcagccatacaaatcatgtcgagacagcgggtatcttcttttttataggtcttaaccagctcacagcaggcatccgaaccaaaacgctccacaaattcctccgcaaatgcggccacagccggtttaagctccggggtagcatgagccctctcatgaatgagccggtagctgatggcggaacatcctccgcacagcgcgccgcacgccttcccgcatcccattccccctccgaatccgcccaccagctttaccgaatcatccggtatacccaggcagtattcatcattcagtgcccgcagcatggcttccgcacagttattatccttttcgatgaagtactcataaatcctgtcccttgtcatcttatctctcctgttctctcagagtatgattgatccatattataaatattagcacgttccaagccgtcaatgcaagttctttgacattttccactgaaaagccccttatcctcattttttcctcttcctctggcaggcatgagacagcggccccccgaataagcagcgggtgagagccgggaacgcagggcggatgagaagcccgccctggctgcgaaaaagggagcctggtttccagcgttccggtgcatccaatcatgatacaccggaacctggagcacccggctcccagttcgcactattctcctaaattctggaatacagccttaagcgcaggatacatctgcctgaacttgctgtactgtttttcatatttctccgtcagttccccatcaggttcaatggtttccgtcactttcacgatgctgtcagcagcagttttcacatccgggtactctttgcagcccacggccgccagtatggcgcctcccagggcagggccttcctcattttcaaccacatccacctttacattcatgatgttggccaccatcttcttccacagcgggctctttgcgccgccgccgcagattttagtgcggtcaatgcggatgcccaagcttctggccacctccagcgaatccctgagtccgtataccacgccttccagcacggcctgggtcatctcctccctgctggtatccatggtcatgccgataaaacatgccctggcccttgggtcgttgtggggagaacgctctcccatgagatagggcagatagaacacatggttctcacccagcttaacgattccctcctgttccctggaaaactccttggtcttaaggatttcctccatccaccacttgttgcaggaagcagcgctgagcatacatcccatgagatggaaatgtccgtccgcatggtcaaaggaatgaagggcattgttgcagtccaccttaaagctctcactggaaataaagatggttccgctggtacccagggaaatgttgcagcatccctcgccaacggttcctgttccaacagcggcagcggcattgtcccctgcgccggcaatgatttttacatcctgtgaaaatcccagctccttagccagttcctccttcagatttcccactacctcatagctctcatacagatccgggagctgttttctggtaatgccgcacagctccatcatttcctcggaccagcacttatgggccacatccagaagcagcatgccggatgcatcggaataatccgtacagaagctgcctgacagcctgtaagccagataatcctttggcagcatgatcctgcatatgcgcgcaaagttctccggttcatttcgcttcatccagagaatcttaggggccgtgaagccggtgaaggcaatgttggccgtgtaagcggacagcttttccttgccgatggtctggttcaggtaatctgtctccttctcggaccgtccgtcattccagaggatggccgggcggatgacctcatccgcctgatccagtgtcaccagaccgtgcatctggcctccgaagctgatgcctgccacctgtgatttgtcacactccgaggtcagctccttcatgccgtccatggaggccgtaaaccagtcctccgggttctgttccgaccatgcgggatgggggaaatacaggggatactcccgtgaaaccaccttgtggattcgtccgcttccatccattaacaacaattttactgctgaggttcccaggtccactcctatgtaaagcatatctttccctccctgcatttttatgcaaatggattctctgtcttatatcttacgctctttggctggttgtagccgatttcctccacatccacgccaatgtacttgaatacctcaaacaatgccttgccgtagtttccgaaggcaacagccccgtggtgcggatagttcttctcgatgagcacatggcggtagaaccttcccatctccggaatggcgaacacgccgatggagccaaaggaacgtgtggcaaccggaagcacctctccctgtgcaatgtaggctctcagcttgttgtctgccgtgctctggaggcggtagaaggtaatgctgcccggcttgatgtctccttccagggttccctgggtcacttcgattggaagagccctggccataatcatctggtacttcatctcacagaaggccagctttccggaagcagtgtttccgcagtggaagcccatgaatgtatccttaagtgtgtaatcaaatttgcccttgatatcagcctcgtacatatccttgggcacggtgttgttgatgtccagaagagtaaccgtatcctggctgataaccgtaccgatgtactcgctgagcgctccgtagatatcaacctcacaggacaccgggattccctgggctgtcaggcggctgttcacatagcagggcacgaaaccgaactgtgtctggaatgcgggccagcattttccggcaatggccacatatttgcggtagcccttgtgctcctgcacccaatcctttaaggtcagctcatactgagccagcttggagagaatctccggcttcttgttgcctgctcccagttcttcctccatctcctttacaatacctggaatcctctcatcccctgcatgcttgttgaaggcctcgaacaaatccagctcggaattctcttctatctccacgcccaggttgtaaagctgcttgatgggcgcgttgcaggccaggaagttaagaggtcttgggccgaagctgatgattttcagctcgcttaatgcagccactgcgcgggcgatgggcacaaactcatgaatcatgtcagcacagtcttcagcatcccctaccggatactccgggatatatgccttgatgttgcgcagcgccaggttgtagctggcattgagcataccgcagtatgcgtcgccgcgtccctggcacagattatccccggactcctcggctgctgccacgaacattttaggtccgtcaaaatgctttgccagcagggtctctgatatctcaggaccaaagttgcccaggtatacgcacagggcgttgcagcctgctttcctgatgtcctccaatgcctgaaccatatgtatctcgctctccacgatgcatacaggacattcgtaaatttctgaagcgtcatatttagccttgtaggcttccactaatgcttttcttctgttgacagaaagagactccgggaaacagtccctgctcactgccacgattccgatttttacttctggtgtattgttcattgtactttcctcctcatacatgattgatttttattgtttgcatctgaaaaacatccattatcatctatatcagacactcaggttctcacccttaaggccgataaaggctccctccggcagaccgccctgggcatggccgataagccatttattcctggcaaataaaagcctgtcctcagggtccttcacttccaccggctccatgtccagattggtgtctcttggaaggacaattacgcacctgaatccctcgtcctttacatggcagggcgcatagtgcagggtggttgcatatacctccaccgctgttcctgccggaaccagaaatgcctccattctggatgtgtcgtatgtgtggtcctcctcaatatcctgctgttttcccagtatcagaatcaggtcgtccacagcaatgtccacttctgaatcccggtggtattctaccgcattcagtttcttgttatgtccgttgcagcatcctatctggattggcatttgtccgtagattccattttccagctcctttgccgcaggcagggcctccatctcaggcagtgagggtatgtaaataacatcctccggtaaaggcgtttgctccattgcctttaacagaccgctgaaatcataacctgtgatgacccttccataggctttaaatgccggatctgtcaccttcttgactgtcatccccaatgttcatacctccttatatcgggccgtgcgattttccatcagcaccagcctgttttctctggtatccattataatataaacgggcaaaaaaaacgtgctgttattttacgaactaacagcacttttttgcgatcttcattcccccgccaatgacttgcggttcctctgtttttgattggcctgcttctgattcatctgcttctgattcatctgcttctgactcacctgtttctggttcatctgcttacggtactggctgggcagacagccgtaccgctttttaaaggctttggcaaatgcccttgcatcggcaaacccatggtccagagcaatgtcccccacataacggtccgaattcagcaattcccgcatggcatatttaaccctcaaatccatcaggtatgtgcggtatcctgtctgagcatattccctgaacatatgggagagataggaggatgtaaagccaaacctggacgcaaccatttccaggcttagctccttatcatagttctccttcatatattgcgtaacctgggacagcttatccaaatgccgtttttgctgcacccggaccttatcaatctgctcaattctgaattctgtcacaatcagatagaggaactccataaactggctctttaccttcaggcgatagccgaattcccctttctcatacgtccggtacatggcagtgaccagggctaccagcctggccttttggctctcatccttatccgcaaaggtgatgcgggactcatcgctcatatatccctcaaaggatttcattgggatctgcaggacaatggtaatattggggtcagggcattcaatggaatggatttcattgggattcactatgacaaaatcattgggcttcaatgtgtattgcctggaattaatgaaaaaatccagtgttccctccagcacaaggaacagctccactgactggtgccaatgcttgcttacccggtaattcccatccctcccctcgaatataaacatccgaaaaggaagatcatcattgggaatcactgtctcgtatctgaaatccatcctgcacctccatttcctgcctgtcatttacgatttacaataatctcggcaaaccatatttagaaaaccgtcatcctgtattcctgcaaggccccttttgccatatctgttatgactcacacaggcctgttcagcttaaaaatcaccatggtgactgtcccttcctgtgcccttgtattgctgttaaaatacaagaacagcgtagtggactggggcacttccacaatgagagaactggctccaaatgcgctgcttctggcatttgccgtccaaaagtatatgccatattcaatgtgggaacttccattgtatacaggtgttatctgcatataaccggcatccgccagcatggatgatacctgataggatatgcagtaataccctggagcaagcgtaatgcgggtggaatctgtcaggacaatgtttccggtggtatccgcgacccccactcccactggtatccgctgggcattattccacacgccggcaaacgtgataaaggatgcaaacacatcccctgctgcaggcccggtggctccggttggcccggtggctccggtcgtgcctgtggctccggctggaccggtgactcctgttgtgccagggactccggctggaccggtggctcctgtcgtgcctgtggctccggctggaccggtcgctcctgtcgtgccagggactccggctggaccggtcgctcctgtcgtgcctgtggctccggttggcccggtcgctccggtagcgcccgtggctccggctgggcccgtggctccggctgggcctgggattccggtcggtccggttggtcccggagttccggccggtccggtggctccggtcggccccgtctccccacggggaccggttgtccccaccggacccgggactcctgctgcccctggtattccccggggaccaacagtacccggatttccctgggggccctgaggtccctggggaccggtaggccctatgactccctgaatcccctgggggccctggattcccattggcccacggggacctgtggggccggtgactcctgccgggcctatttcccctctgggaccttccggtcccatggctccgcggggtccggtatctccctgggggccctcagcgccggtatttccctggaggcccggagctccctgagggccggccgggccctgcgctcccgtcacgcctctctcccccggtacaccctggggcccctggggaccggtgtcccccctcattcccgcagctcccataggaccgcggggcccagcggggcctgtatctccctgggggcctgccggccccgcgggacccggacagcagcagcactccttataccagcaccctgctctctccctgaaatcctcctcattgccattccacatgttagttcccctttctgcacatattttgtaataatacattactatcaatatatgcatcagacctgcactgtttccggggtctgtaaatcaggggacttcgtatagtctgaaaaaactttgtgcccggtgttttctgctcagcagttaccggtccacacataccttaaatactccctggcagtctggaccagggcatataccctggccgcatctgttgcgggtctgtcatccattttccagcgcggaaaaaacctggttacatggagaggaatctccgggctcagggatgatatccagcccgccatctccctcatctcctcatccgagtcattttcccctggaacgataagcgcggtcagctccacatggcatcggcggctggcacatgtgataaaatgctttacagtttcaagatcaccgcccagcttcctgtaataattctctgtaaatccttttaaatcaatgttcatggcatcggccacaggcaggatttcatccagtacctgatcggatacgcttccgttggtgacaattacatttttcatccctgcttttctcacaagacgccctgtatccctgacatactcccagcccaccaggggctcgttgtaggtataggcaacacctatatttccgtttttcccaagctctgcagccttttgggccagctcctcaggacttacggtcacggactcaaaatccccctctcccgccatggatatctcatgattctggcagaaggggcaccgcaggttgcatccaaagcttcccaccgacaatataacagagccgggcaggaaccgtcttaaaggctttttctctatggggtccagggccatggacgtgattttcccgtaattaacaggaatcactgcgccgcctgtattcttcctggcccggcacatgccggtctgcccttcttccaggctgcaccggttcatgcatcccctgcacacagccctcatgactttgcaccgtgacggataacctcaaaacgttccagctgcacatccgtctcatcctcacctatccccgccttttgcctggcgatggacaattgttccctcaccgtgtccactccctccagatttggaagcagcagtcccctttttctgcccttggtgacaatgacgccgtaacgcagcgggtccagctggtcctcaccctgaatctgctctgtctcccccagcacatccacgctgtattcaaggaaagacagttcctccctgcggacagacgggaatctggggtcatggatgcctgcactcactgcgttctgtatgatttcctccgcaatattcctgcaaaccggctctatcgtcccgatgcagccccgcaaagcgccgcccttgcggacagatacaaacactcccgcccttgtctgaagcatttcctccggcaggccttcctctgccctgccaaagggaatcatccttccctcatgcacataatactccagcgaccggcgtgcaagagacacatattcatcctcctccatctgccgttttttacatgtttccctctggcagctctcatataagtccaggaatccgcgcctgccgtcatcccctgtgacccggaacgtacaaatcccatagcccaccccaaagggcccttcataggtgaggcgcctgggcataactgcctttttatccatggctcctgccatcatgacaaagctgcggtggccgcattctcctgccttttcgcagaagtcttccggaaaagccagcagctccccaaattccgcttttcccatgacatccatgatccgctcatcatattccggcccctggacactgtacccataaggcccgtcccctctcaatttatgggacaaatccccgctggccacaatgaatacactgcgccccagattctctgccgccctggcaatatagcgtcctgcccggtaatggtcggcaaaggacagtccggatccgccgatccgcaccagcttataatccctgtaatgctggttaataaaatacagcgggacaagagtcccatggtccagctccttttccctctccccctctgtacccataggaaaaccgtcatccccgcagagtctgtccagttcccttacaaaggcttcgtcgtatccggcttctacccctatctgaggagccatacaccggccaaagtctcccctggcttcctttcccggcgatacatgaaaatagtccgcatacatcactgcatggggcgaaatcaccacaagggtgtccggcttcagctctgctgccatcccggccgcctcctggtatgctttaatagtatccttaatcagaatctcctgccctcttcccacatccggcacaatcaaaggcggatggggcaccatgatccccgcagccacagccataataccgctcctttccgtccggtgcgttccaccgcaccctgcgatctttaacaagctctggtttaagtatagcattggaaatcctattttaaaaggggataacccacaaagaaagcacaagaagcactgccaggaacagcaggttaaccacggtaaaccaccccagataccggcctttttccatgggatacatgcgggcgatatgcttataagaaataaggctcgccatggaggcaatgagggttcccagccctcccagattcgtccccacaattaaggcactgtagtccccggaaaatccggacagcaaaagggcggcaggcacattgctgataatctggctggcgcccacacaggtgatgatttcccggccctccagaatccggcccaggaaccggcagaaagccggcacccttcccatattgccgataaatacaaaaaatgcgcagaacgtcaggaggagggaataatccactgccagaaacaggctcctgtcggcaatccacacccctgttatcacaacggccagcagaagctgccacggaagaatgcgggccacacaccccaggctgagcagaaagaggaacagatacaggcctaaccggcctaagtaaatcctctttcctgacgcctccatacccgctgcttcctgtgaaaatccgggaaacccgctgaccataggcccctgtcccctgccgttcctctcttttcccggcattctgtttcctgcagccactacggccagacaaaggaccagcatcccaaaggataccgctgtgtagggagccatcagctccataaaacggcctgcgtttaaaccggcttttgaatacagataaaggttctggggattgccgacgggcgtcagcatgcttcccagattggccgcaatggtttggagcaccaccacaggcagcactaacggttccatgccggccatcttaaggaccgcgatggcaaagggaacaaacgtgatcaacgccacatcattggtaatcgccatgctgaagaaaaaacacaggaacaccagtacggccgacacagcccccgggccctttacataacctaacagccgctcccctgcctttttaaacactcccaggctttgaagtcctgccatcacggtcatcagacaaaacagaaggccgattgtcttataatcaatgtaagacccatattccctgtccggccttatgactatggcagacagaatcgccaatataacagcagcgctcagaactgtttcccttttgacaaaccctttaaccttattcatccttcattccccgcttttacgttcataatctcacgactgcttactataccatcgaaaagcccgggaatcaatacaaaatctttaaaacttcagatccctcccccgttgatgcatactctgtcctcctcccccggtttcaccgtcattacctgacagtatcgtacactgcctgtaaccgctatgattaccggaaaacaggcataaatgtctgggactgtccgtccagcacgcccttatccgtcataatggctcccggcagggcagccagggcaaaggtggacatcttaagcagcgagctctttcccgcgcaaaggtcatacactgctttttccacctgttccacctgcggggccaggctgtcaacagacagctgggacatcagcccggcagccggaagggccaggcttgccagcacctttccattgagaaccacagctatgccccctccgcttctctttaaggtctccgccgcaatccatgcatcctccgggtcccggtatatcatggtcaggttatggcagtcatgggataccgtggtggcaatggctccttccgtgattccaaaattccggatgggaacaacggtcctctggttcagtccatgccggttgcatacacatgccatagccagattcggatcttgcctgatgcagatgtatccgtcctcaacaggcagcgtctcataaaaggccttattgaagggtccgtcatacttgctgtatatcaccagcgtctctccctgggaagcaggcgctttcagcctgaaatccccggggccggacagataggacagtttcatggtattggtgaacttgagtcctccgtcatagggacttcccagataccttccctcttcagccacaagtttccccctgcagaacacatggctgggccggcggccgtccagggcatccaccagctgcatatccgccacataacccggggcaatcgctccaaggtcatcaaacccatactctctggcagcgttatagctggcataacggatggcgtctaatggatgggcaccatagcctatggccttttggaccacccggttcagatgtccttctctgtaaatcacccctgcgtggacatcatctgtgcacagggaaacactgtcatgccagcgatggtccctgattccctccagtgcatccggcagatggttggaaagagagctggtcttaaggtttacatgcatgccctgcctgactttctccctgcactcccgggcactgcggcattcatggtcgctctccggtcctgccagcaagtaggctgcaagggcatctccctccaggcggggagcatggccctgcagatacagattccgtttcagaccctgggatatgatgcggctcattctttcatcccccctgcatacatccacataattcatgatttccgcgattcccagcacctccggcagttccagaaggcgggcaatttcctcctcgccgaacacggccccgctgttctccgctccaggcacagagggtacacaggagggagccagcgcaaactggcgcaggggcgttttctttgcgttgtccagcatgaagctgaccccttcaatccccagcacatttgcaatctcatgaggatccatgacaatggtagtggtcccccagggaagtacggcccttccgaaattctccggaaccatcatggtactttccacatggagatgggagtcaataaaccccggtatcaggtaacgtcctcccccgtcaaaaatccgttccgaaggcagggccggacattcattgtctgtacgcacccgcacaatgatgccgtccagtatatctacctgagccgggtaaacctccccggaaaacatgttgaccagctgtatattgcagacagtcaggtcacaggggatttctcccatagctgccctgaccatttttccacggtccatccacactgctattttcatacgatttcctcctcctcggaaacagattagataaaaaactgaatacaggtcaacagggtaaatataatggtgaacggagatggaagcttatccattccccgctcatccgtaaacaggtagtacgcactcttcacaccacagtaagtcagaaggccgatgccaatgccctgagatatcccataaaacaaagtggatataatcagcattcctaccggtacccactcctcaatcccaaagtcaatggatttaagtccctgcatcatgacaaatccgataatgagaagtaccggcgtggtggctgcagtgggtatcatcaaaaacagaggggcgaataacacggccagcagaaaaaacagcccggtaaccacggaggccagtccggtccttccccccacctcaatacctgacgcactttccacatagcttgtgaccacagtcactcccatgcaggtccctacaacggacccgatggcatccaccaggaagatcttgccgataatagggaaatttccgttttcatccagcatgcccatctgctgccccagccccagggcagtagccagcgtcccaaagaaatcgcttacaaaaaaagccagtacaaaagcaatgtactccggtctcaaagctcccagcacatctgctttaaaagcaatattgcccagggatgcaacacctcccgatgtgaatatggatgagggtacctggaccactcccatgggaatgccaatcacagtagtgacaacaatggcaatcagcagtgagcttctgattctgtactctcttcctcccgtcttaatgcggaggaaatacagtatgaaacatatgacaatactgacggctgacagaagcaccgaaggatcggagaaatccccgaatccccggaaatccggattcaccagcctggcattgaccagggccgtgcggatgataaaaatacccagccctgcactaatgccaatcttgatatttttagggatcagctccactatcttttcccgaatcttaaacaggctcagcaccaggaacaatatagcagaaatcatggacatgccaagacccaccttccagtcagccaatcccggcactacgatagaataagtaagcacaatgccggacgcaatcccgggagccagagcaataggcatgttggccgccacccccatcagcatggtgataaacgcggaaaccagcgctgtggcaatcagtattcccactgtgtccatccccgtatcccgcatgtttaccggctgcaggataatgatgtaggccatggtggcaaaggtggtcattccggccagcacctcagtcctgacgctggacccccgctccctgattttaaaatgtttttccaatgtgttcatagcttcctcctttgtatttttattatttaagtttaaagttaaatcgaaataaaacccctttttgtgtaaatcagtactatgataatatggtaataccttattgacggcatgcttttatctgtgcatacaggttgataggggggctgtgggaaaattcattcctgtcacctgcagccgtcatcacaggaatgaatctttataacttaccctctcacaggccccgtggattacccttccgcatgacgcaggagattaaaacggatgtggctggtatcatagagagccaccccgtgtatgacaggctcactgttctggtcgtatcccactgcctgaatcataagcacagaagctgccttaaggggacagggatgtcccagcatctctcccgcctcctgcgctgacagggaactgacttctatccagtcccgcaccaccatgcggccggtatattcctggattacctcaaaattagacttttcctgccagtccgtccgggcaggtgtttctgaaaacagatggaggggaatacaccctacactgacaatggccggaatatcgtctgccagatacagcttctccacccgtatacccctgcctccctttccggtgccaaggtgttccccaacggaggccggtatcctctcctcgtccacggaaaccagcctgcactcaggccggtatccgtttccgctgataaccgaaccgaattcaagcatgccggacagattcaccttcacctgcctggcagcgggattcacaaatgttcccctgccgtgaatgcgcagaagcagcccctcctgctccaggtccgtcagggccttgcgtatggtaatacggctgaccgccagctgtctggccagttcctcctccggcggcagtttccccgcctcattaaaggctttctctgatatcagttttcgcagcgaatctttcacactgtcactcaatgtcttttttcggatgggtgctattgaaggcatattctgtttcctttctatatccggcttcacaatctgcgggcttttccgtatggcattatagtatcatggtaatacctttatgcccagtctatcatatctgttttttcttgcatatggatactttatacgaaatttccttcacaacttcaatagattacacaaaaaacaggcagcggcattctgtttcaaatgccctgcctgttcacattcctgtctgctaatccttcctcccatcggtttcgccattcccgtctccggacagtaccggcaaagtggaaccgccgtagggcatcacaatcaccctggcccccggtcccatctcctttaccgccgcgtcatatgcctcctgcacatggtcaaaaggctccatgaaaatatcgcgcaccagttccctgtcaatgcctgacaccagaaatatcctggcccgttttaacgctctggcaaaggaagcagccttgtgtccgccaatctggaaatccctctgtatccgttttagtatgctgtccaggtcctctgcctccagcatccactgctcaaacacagctccccccaatccttccggacaggcgcccgccagaatgatgatgcctccctgacgtactgcctgctccgcattggccagggccttctgtgtctgatacaggttcagatcctttggagcccctccctgggatacaatcacgatatctgccagctcattgatctccatacggtaaaacccgtccagaaacctgcatccctgtctgtgggcctccttaagctcacctgccacagcgtgaatcacatttttatgctcgtccagaaccacgttcaaaaggaaatccacgccgcagatacctgccgcctcttccaggtcctcccgcaccggattcccttcaagggttcccgcctttgccatggggtgaatcatcctgctgtggtttttccgaatggcctgcatggtggaaacgcccggcatgattgcctttgctccgcccgaataaccggcaaaaaaatggtattcaatattgcccagacatattctcaggtcagcatgcgccaccttatccgctatgtccaccggtgtgccggcctttgtctctcccatatgaataaagctgcattcggacgagtccatgcatctgcaagtattatatacttcgtcccccgccagatgccgcatctcctctgacgtatgtctcctgtgggtccccatggcaaacaccacagtgatatgggagcggctgactccggccttttccagccgtttcaacacatggggaagcaccctccaggaaggcatgggacgggtgatgtcacttgtaatgatgaccacatcctttttccctgatgccatcttttcaagccgttctgtgcctatgggggaatccagagccctctcaataatctcttcctccggcgctcccatctcttttttatggggagtcaggatatgggcaatggcgtctccggggatttttaccttttccgtgcctgtaccataaccaagctctatctcctccatagccctgtgccgcagctcatacacatcgtttagctttaccatccctgttacctccgtatcctgtatacttcttctgcggacctcccactggctgtaagccagcataaaggcagccgcgcccttttgctcatctgagacaactgcttctcccagataataagaaacacttccatcccgttccggccggtcagccggtcccaggcctgcgcctgcgcaggttccctccaggtggaggcatccgtttctgagcttcagcttctctgtctccagagccatcatgataaggtccgcccgctggactgtctgcctgttaaatattcccatctcatatcccttataaatggaatacgctgccatggccgaggcagacgtctccagataattgcccggtgtctttcccagggccgtcagctggaaaaacagaccgctttcctggtcctgataccggagcattccctccatggcttccttccacaaaccggccaggtactgccagtcctctgacccccttggcaatatggaacagcagtctgccagtgccatcagataccagccctctgcccttgaccagaaattcggggaacgccccgtctcagggtcggcccagaactggcattttccctcatcatatgcgtggatatacaggctggctgactcatcgtacaggaaccgcctggcgttttcaaactgctttatgatgtctgcgcagttctttttatcccccagctccatctcatactgaaggtaaaagggcgccgccatataaaggccgtccagccatatctggcggggatatatcttcttatgccagaaacttccggattctgtcctgggctgacgccgcaattgctccataagctgctttgctgccagccggtacttctcctgccctgtctctcgatacagaaagagcaggccgcggccggacggaatcttgtccagactgtactcctcccggtcataccaccgtatcctgccgtcagggcatatgtaccggtccagaaacacccttaccgcctctgcatagcgtttcctgcctgtggccttatacatggcctccaggccagtgaggacacagccgtcctcatagttccagaacttcctgtccagtttcatgaactcttctgcatactgactgatataccgttcagctgtcatggccctcctcttttatccgcttgataaacaatggcttgatgcctcctgcttccagaatggacatggcgtattccccgattgtttcacactggtgctgttcccctgtatccagattcttaagtacccctgccgtcatattgatttccaggttctggccgctctccacctttcctccgatacccttgcacaccagcagcggaaggcccagattgatggcgttgcggtaaaaaatccttgcaaaggattcggccaccaccgcccctgctcccatgttaagcagggcaatggctgcatgctccctgctggatccgcacccgaaattagtgcccgccacaatgattcctccctttggaaaatttcgggcaatcccctcatccacgccttccaggcagtggctgccgatttcctccggattggtaagggccaggtaacggccaggataaatctggtccgtatcaatgttatttcccagggccagggcctggcctgcaaatttttccttcattttctcactcccctttcccggttgcttctgtttcccgtctctctgcctgcccctgattttcccaggacggatcggtcagatatccggtcagcgcagacatggccacggtagctggcgacgccagatatacggcggaatccctgctccccatcctgcccggaaaattccggttggaggtggtaacgcacacctctcctgcggccaggactccctggtgggcgctgagacagggaccgcatccaggcgcggatatggtggctcccgcgtctatgagggtgtccaggaagccctttgcaatacattctttaagtacttcagcggatgccggaatcacaaccatacggacatggggggcaattgtgcgccccttcagtatgcggacagcctctcctatatcctccacacgtccgccggtacatgctcccacaaatgcctggtcaatgcggaccctgcccgccagggccaccgcacccacattatccacgctggagggcatggaaacctggggcttcagtccgcttatatcaaagacataggtttcctcatattcaaaatcaccgtccgtctgctccaccgtaaacgggcggctggtccggcctgccacatagtccaaaaccgcctggttgggctccatgtaagctgtctttgcccccatttcaaccgccatgttgcagagcaccatgcgcccagccacatccagctgttccacataggagccggtgaactcgatagccttatacactgccccatccgccttcattttccctatgatatacaaaatcacgtcctttggaagcacatggcttcccggcatgccttccaggtgtatccgtatgatttccggcaccctgaaccagagttttccggttatcaggaccgtggccatatccgtggccccaatgcctgttcccaggcatccgaacgcgccgtgggtggtggtatgggaatcggttgccaccagaatcatgccgggatacaccaggcccgcctcaggcataacctgatggcagatacccgcgttgatgtcaaaatgatgggtaagtccctgctcctgcctgaacaggcgcatctccctgtggttgcgggacgcctcaatggtgggggagggcgcatagtggtcaaacacaaaggccgccttgtccctgtcccataccttctcgcctcccatctcccggaaggaatagatggtctggagatacaggtcgttaatctccgcaaaatcaatgtcggccgttatgatttccccgctgaccacccggtcacggccgctgtgctttgccaatatcttctctatcgcatgcatatccttttctcctgtcctgcttttttctcctgtcctgcttatatgattctgaatctgtccaacacactgtagtcaggctcaaagccgattcccggacgttccggggccggcagcctcccctccctgtcaatctccagggagtcattgaacgcattttgccacacctcatcgtatgccggaggataatactcaatataggacacattgcccactgccgctcccagggaaacattgatggtctggtccccatggggcgccagctccagacagtggacctgggacagggctgctgtctttaagaactccgtgacgccgcccatgaggaaaggcgccgggtttaagattggaacagctccggtgtcaatcagctccttaaagccccatttggtatactcattctccccggccgccaggggaatcactgtcttgtccgccagccttttcatcccgccgtaatcatggggcgccaccggttcctccagacagtagatatcgtattcctccaccagcccggcaaactggactgccctgtggctggaatacgcacagttggcatccagcatgagcagggcccgggggcctatggcttcccgcacagcctttaccctggcagcatcttcacggatgctcagggcacccaccttcatcttgacgcctgcgaccccctgttccatataaccctccatctctctctggagatccgcgattccttttccaggttcataatatccgccggcaatataaacaggcacgctccttctgtattcccccaaaagccggtacagcggcagtcccagggacttggccttgatatcccaaagggccatgtcaataccgctgatcgttctggtgctgattcccttgcgccctgtaagcttaggcacatagagtctgtcccaaagccactccgtgcgcataggatcctgtccaatcaaccggtctttcagctcatccaccatcatgaaaggatttatgcccagtaccggaccggaaaggccgtatcctgtaatttcctggtctgtctccactgtgataaccgccaggccgcagtgggtgtaggtatgcattccgttggtgatgggacggcttttctcccatctgaaatattcctgtcttacatctgttatcttcatatgatgtcctttacaaaagggaatgccgcaaaatgcatctccccattctgcggcatctctctcctgttccttcctgcccttactgggcagttgctgtctctatttcccggttgattccgtcaatcagcatatccgcacaggcagcagcgtcctcttccccatagctcaaagactggattgcaagggtatacacaccgtcaggcgcctttaatgcagcccgctctgtgaatatatccagcttgaaggcagaccatgccatcagtttctcattcatttcagccaccaggcttccctcagtctcaacatatttaaccgcatttttgttgcacgggatgccgcggctgtctccaaggataacagctccttcttcgtccccaaacaggaactgtatcagggcagcagcttccaccggatgctcagaagtggaagtgattgcaataacctgcgatgccttaatgggaccgccatggtattcgcccatattaatcatatcgcccaccacaatttcgccgtcagtgaccgcatccacatacttggcaatattggtatcccagcacatggcgccgccgtaatggccgttaatccagctctcgcttgtctccaaaagttcagaggtgccttcccctgccagcttctcggaatcagggatgatgtgcctgtcttccagctccttgatgaagttcagtccttctgcgatttcttctttggagtactgaagcgcattgtccttaatccaatccctgccgtatttacactggagataataaatcatgagatgcacctttacataatccgcacaggcaaagggatagtaggatccatcctcataagccgcgaatttctcccccgcctcatacagctcgtccagggtagtgggtatctttgcccctaccttatcataggttgtcttattccatataaaaccgcggcccgtattggcgatggggagggcctgcagggctccgttcaccgtataaaaggccttgtcggaatcatcataattagacaggtcaatgatattggaaaccttgttcagatcataaaaggtatctccgttgggtgagtaagcaaaaacccagtccatgttcagctgcaccacatctgccgcggatcccgcattaagggccagggatatcttctcctcatggccgttaaaagcctcgtactccgcctccacggttatgttgggatatttggcctcaaatgcctcgatggccttaagtgtcttttcatggcgggaatcccctccccaccagttaaaacgcagggtgattgggtctgtggtgtttacctccatgtcagcagaagctgccgcctctgtgtctgccccggctgcctccgggtctgctccggctgcgttttccgccgcctttgtatcctgggtcttagccggagcggctgcggtctcctttgactgtgtgggcatacatcccgccagggaccctgccagggcacccgccagaatcagactaaccagttgttttcctcgttttctcatgtgtaacctcccattataattttatttatttttctttacccctttactccgcctgctgcaattccgtctacaaacgaatcctgcgccataaaaaatacggccagggacgggataattgccagcagcgacattgccagtatccggttccagtcaaatcccgtctctgtatccatggacattctcaaaaatatggataccggatatttgcgcactgaattaatataaatcaacggccccatgaaatcgttggaggcccacataaactggaacagggcacatgaaacgatagacggcttcagcatgggaacaatcacgtaccacagtctctcaaccacattacatccgtcaatctccgcagcttcttccagttccctgggaatcccccttaaaaactgtatcagcatatatacaaagaacgtatcccctgccagcatggaaggaatcacaatcggcagataggaattcagccatcccacctcgttaaacaggatgtactgaggtacatttaagaccacctgtggcagaaacagtgtggagagcagcagcacgaagagcaggttcttgcccacaaaccggaacctggcaaatccataggatgtaattaccgcggatataacggtgaacaccactttcggcagtacaaacttgtatgtattccccataaaatgcagcaggttcatgccctcgtaacccttaaatccatttctgtatccgtccagagtaggcgccatgggaatgattcccgcactggaaaacagctctgaatttgtcttaaaggacgctcctatcatccagcacaggggatatatcatcacaattcccaggccaatcagcaggagataccgcaaaaacaggttaagacgtgctttttcttttctgttcatatgcctacctcccatcctcatctgcatagtaaacccaatacttctggctgataaaagccaccgccgtaaaggtcatgattaccaggaaaagcagccatgcaatagcgctggccagccccatctcattccgcttaaaggcttcgttatagaccagaagcgataccagggtggtggagcgcagcggacctccctgggtcacgatgaagggaccattgaattcctgaaatttatgacacagctgggtcacgaagttataaaaaataacaggtgtgattaacggaaccgtgatttgaaagaactgcttccattttcccgctccgtcaatggccgctgcctcgtaaagatctccctgcacccctttcagggccgccaaaaagatgaccatgggagaaccaaactgccacaccctcagaagcacgattacaaagaacgccccgtcgggattacccagccagttaaaggccggaatacccagcgccccaagcatgatgtttacaaggccctctgtcttgaacaaaaacttccacaggaccgcaatggacactgaccctcccagtatggagggaatgtaataaatggtcctgaaaaaattgagtccccgtatcttattgttgagtatgtaggcaataaacagggcgaacataagctccagcggcacggttaaaaacgcgtacttaaaggtctgtatgaatgccttgataatcagcttatccccaaggatgtacttgtaattttccagcccggtaaaggaggctgtcttgaacaaattgtaggaatggaagctgtaaataaaggaggccgcaaagggatacagcttaaataccaacagtccaatcagccagggcatgacaaatgccagtcctatattgcgtttccagaatcccttcttcttttttttcattcttatcccccatacgtttatttccatccggccggaaggtaacgttctgtattatgaatcatgtcatctgccagtttccttatctcaccctcatcccggcatttgtgcttcaccagcggatcattcataaatgcctttaccaccagattccggtcatatgtatctgctgcctccagtatgtatccgtgattctgtacatgtggaagtatcaattccctgattggttccggcaggggaccggctgccactgccctgatgctgtcacgggagaatactgcatttgtctccaccacagcctcctttggaagattgggaatctgcaggaagctgtttggcatattgacattgctcaccatccggtccagacccaccagagcctttatctgctgtaccccctcctcaccggacggaacaatctccatctgctcctctccttgaatcaggcgctttctcctggccaggcgttcctccatctgactgattctaaagtccactgtggtcagcccgaacttccatgacctgactgtctccgggtcattgagataggtgtttcccggcatgaactctgccagatgccggtctcctgcggcggcgatcagtccataacggttaaacaaatcaaatttcaccctgtgccggcagttaaaggtagatttttcccatggacggtcagggtcgtcgtaaccctcctcaaaatgtgtcccaatgtacttcttatagacagggaacaggtccgcgccttcataggaagcagcgtcaaaccaggtaaaatggttgattcccaatacatttacatgaatatccttacggtcaatggggcctgtccccagctcctgtgaagcaatggcggccagcaccttctgtgtgccgaacacctcatggcagcagccaaaggccttgatttcaggaaatgtcttatagagactggccacgcacaggctcatggggttggtatagctgatgacccatgcaaagggacaaaactctctgatagccagcgcaatctcctcatacatgggcagggtgcgaagggcgcggaccataccgcccggacccgccgtatcccccaccgactggtagatgcccagccgttccggcaggtgtacatcggaacgcatttcctcaaaggtccccggcagaatggagattaccacaaagtcagcgccctttaacgcctcctttaaggaatatgccaccttataatcccaccggcctgcggcctcttttctctccttaagctggctgccgatgatctggttctcctcagctgccctggcatctatatcatagagccagaccgtcccgtccagcgcaggctccagggccaaatccgccatcagtttccacgcccatgccttggatccccctcctatgtaagccatcttgatatctgatacatgatgattgttccacttcattcccatatcctcctcgttatgagcacttggcgtctgtctttcagacgcttacgtgcgatacatgccgcctcctctgaatatcgtatatcgtatacgatttactgtagttttatcatacttccgatgaaatttcaattacttttgtatattacttttatattttggctaatatcactaatttttatgtgcactttttcatttaccaacgcaactaagttttgactcttttgggtttgtatgctaaaatagctttattctaagaaaagcgggtgaaacaaatgaaaaagctggattcgctggaaataatgcccacgcgcatccgaatcgcttccattcttcgcaaggcgattctgtcaggcgagtttaaagaaggggaagaattgtcccttacagacatagccaataacctgggtgtcagcaggacgccggtccgtgaagcatttcagattctctcctccgaaaatctgattctgctgagaatgaataaaggggcgattgtaaaaggaatcaccaccaaaacaatccgtgagcattttgagatgagatcattattagaaggggaggccgctgtcagggccaccctgagacattttgacgtatcggaactgatggaatcccaggtccacatcgaaagcctgggagaaaatttcacagatgacgagtatcagtcctataaccagaatctccatacctccatatggaaggctgccgacaacagtaagatgtattccaccctctcctcactgtggaatggaagttcctttggaaaaaccgtttcagccaaggaccatcagattctctccatcagggaacacaggaacatcctggaatacatccagtcctgcaatccctatctggtgcgaaaggaaatggagcaccacattgaacgaagcatgaacaatatcattgacagcttctccttaaaggaaaacgagtaagaaaaagaaaacgtacgctctctggcgcacaaaaaaccgggccgcagcatctgctgcggacccggttctttatatgtagaaatcaaggaaagtgtatctgatatctgactatgctgcaaatggagcgatttcctccatcagctggtcacagtcatctgtgtgaagaatcagttctacggttttggactttgccagtgataatacacctacaatagactttgcatcaaccatacggctgccgcatttcacatctgcatcgcactcaaaacggttcatgattcttacaaaattgataatctggtctgcctggtcaaacttaacaaggatacgtttcatgttgttcacctccgtatggtattttatttagtatcactgtcagatacttgggggatggtacttactggtaagtccgcatctgacaatgcctgctaacgttatcttttgtttgtcttccgacatatttataataccacgttcaggtactggatttccatggtaatatttttctatctcatggaatattttcaaatattatccttatatcatctaaatctggtccttccagtaaccaatattttccgaatccacctttatgggctctccggctatgacctccagcccgccgtcatgaccgtaatccatggggtaggtcctgcctcccagaagcagctcctggtcccccctctcctcaatacgtccctcagacagctccaggcacacataccctgccacccttcccaggtccatggggttccatatgtaaagtaccggacagatatcctcaggatcgctgcccacatagtcctccatctggtccggaagtcccaggccgatgacctttacctttgaggcctggccccgcgccttcaccacatcagccgctgccttgattccttccgtggacaggcagcacattaccttcaggtccggataagtctccagcatcagctctgccttctcagccgccttttcatattccccttccccgtaggcaatgtccaccagacgcaggtcacggtactccaggttctgcagctcctgcttcatcatgtatatccactcgttttgattggcggaacggcttcccgccgacaggatgccccactggccgctgtgaccgcatatacggtccacctccctgaccagttccttgcccagctccctggcatccaccgggcttatgtaaatactgcggcttcccgcctccacatccgcatccagggtgatgacggagattcccttttccctggcctgggtcaggaccggagtcagggcatattcatcgttggcagccacggcaatggcctccaccttctcgtcgataaggttctgtatcagatgtatctgctcctgggcagaggggtggtcggggtacagcacaatacagttcttgccggcatcctccaccgtctgtttaaacccttcgctggccagctcattgtaccagttgtttctggatttcatgataatggcgtattttcccctgttaaactggctgctctggcaggaaaacaggaacaacacgcctgtcatcatgaccgcccccgctatccaagcccaattttttcctttcaccctgccgttcccgccttcctgctgttttttcccagtatatacctaatgtcgtattttgtccatttccgttgcaaatttatgatttcttgatacaatagttgtatcggtattgattattgtatacaaatcactgccttttagaaaaggatggatgatgatagatgaaacttctgattgttgatgatgaaaaactgacccgtgagggaatccgggacagcctgggcctggagagccttggcatcagccaggtactgttagaggacgacggcatacacggcctaaaaaccgcccttgaggagcgcccggatattgtgctcacagacgtccggatgcccaggatgaacggggtccagatggcggagcggattttaaaggagctgcccggaaccagtatcatctttatgagcgcttattccgacaaggaatacctgaaagccgctatcaaactgaaggctttgggatatgtggaaaaaccccttgacatggaggaactggcctcagccgtaaaggaggcagtggacagcagcaggaacgagaaaataagccaggcagcagcaaggcttcaggaaaaggaacagctgggccatctgagcctcctgctgtcccagccagaggaggaaagtcttataaaggcaggacagctggcggcggacctggggctttctatcacccataccacctgcttctgctgcattatcattgactgtgtcactcccttatccgcactgcctgaggaacagatggacggaatcagggattattttatggagtatctcacatccatggacatatcccaggcctatgtgctgaggggggaccaccgcattattgttttcctccactccccggtgcgtcccgcggacaagaccctgtacgactgcgccggtctcctggcccaaaagcttattaagatatgtccctttttcatttctcttggcccggttgtaagcggaatggaccgcgcgcatctatcttaccaggaagccagcgaacatctgaaggaggcatttttccacgactacggattcatactgacccgcaatatggaaacagctgttttccggccgccggcagatctccttctggaattttccatggccctgtccgaaaagcaggaggaggaagccctggacatcgtcaggcggctgtatgaatcctttgtgccaaacgacatgattggccccagccaggtaaaggatatctattacaagtatttcagcaagctggacgaacacggcctgggaagctatatttccctgtggcagaaggaaggactggagtctgaatccatctgggaaggggttatgaactgcaccatcctgagggagctcaacgaccttctggcagcaaaggtgcgcctgttctttgagcgccttcgtggaaacagcgtgggaaatccggtggtattccagataaaggaatacatccataagaactatgcggtcccgtccctttccgtgcccgatgtcagcgaatacgtccgcctttcatccagctacgtatgtactatttttaaaaatgagacaggacagaccttaaaccagtacctgacggattaccgcatcaagatgtccaagcagttcttaagcgatcccagatacaagattgccgatatttcctccaaggtaggatacagcgacggcaattactacagcaagacctttaagaaaatcgtgggcctgtccccttctgaatacagggagaaaatgcttgcatgaaaaacccgttcacaaagctgattcaccattatacctatgacatgcgcctgaaaacaaagcttgtcatatcgcacatcatcctggttctgctgcccaccgccgtactgtcaggctttctttacctgcgcatttacggcattgttatggatgacagcatccgctcggagcaggctttgtccgcacagaccgtgacctccatcgagagtctcgtttcccatgtggggcacgcctctgacaccatcaccggctccatgatggtacaggatctgttccgggtacccagatcagaggccagtacccgggatatctccacctccaagatgaacagcctgttccacctggtgcagagcattacggaccattccatgattatggatgtgaagatttattatgatgacagcgtgtacggggacctgatgcagtacaacaagatagggaatgccctgtttaacccggtttcttccgtcagcagcagctactggtacggcattttcagcacctcacagcagtcgcgcctgctgtgcccggaattgtacctgacaccggacgagacgggaaagagcggaaagctggcctatattacccgaatcccttatacctatgaaggcggtactgtgtccgacattgaaaatgcctccgcctatgtggccctgtatctgtccggacctgcctttgagacggtgctgcgcaacgacgccacggtcacggatgaggctgcctttctggttaatgagcgggatgtaattgtgtccgcctcagatatgggcctggccgggaaatacttcattccccgccgtgatttggagcagcgggtgggaaaggaaaagaccttttcccttgtttcctatctggacggctctgcctatgtcgcctattttcccatcgcggacacggactggtacatgatgtccattattcctgccctccatatcggagacgccggaaaggcgctgatgacgcattttgccatgatttacctgctgttcaccgccctggccctgtacactgccttccgcctgtcgggttccattgcggaccgcatcataggcgtggccctgcagatggagacggtgcgcacaggcccgccccagcccatggatgtggctgacacgggctgcgacgaaattggtgtgctctccgatacctacaactacatgacagaagaaatcatcaccttaatggacagccagaaaaaggcttcggatgagcttcggatggcggaattccgcgcccttcaggcccagattaatccccattttctctataataccctggatatgattaactggctgtcccagaccgggcagagcgagaaagtaacggaagcagtccagatcctgtcccgtttttataaactgactctgagccgcagggagctgatgaactccattgagaaggagctggagcatgtaagcctttatgtgcgtctccagaacatgcggtatgacaattgtgtggcctttgtggtggatgtgccggaagaactgtgcgagtacacaatccccaagctgacgttccagcccattgtagaaaatgcctttctccacggaatcatgatgaaggaagaaaaaaaaggcagtatcctgctaaccggctggccagagggagatgatattgtattcatcatctctgacgacggggcaggcataccgcctgaaacgcttgatactttaaaggatgatgtgaatgccggcaccggctcctccgccagccccaggcacaccgccttttccggccatatcggcatctacaataccaacttaaggctgaagagcctgtacggcgaatcctacggcctctccatcaccagcaccctgggcaaaggcacggaggtaaccgttcggatccctgccagacatatcacgtctgactgattcctttcacatcccagcaatatgattcataggccgctgtcaggttcatggcagcggtctcttttgctgcctttttctccagataggatgcctggccctccaggtactgcgtgcctgtcagcagtccggcctgctgctttctctggagtccttcgtaggtcagctgggcgctctgaaaggcagtgagggccgcctcataggctgtcttgctggcctggaggttctggtaggaagccaaaaacgctgcctcctttgtcccctccgcctcatccaccagcttgaatctgatattaatttcagtggtactgctggctgaggtgtggcgggcattctgcacgctcttgtcatttcccatggccctgatcttatcgctctcatagtccacggcttcaatggcggccatatccggctccggtacggttcctatgaccacctggctgctgtcctcaatccccagcatggtaagaagctgctgccgcagctgactggcctggagcctgagggattccagcgaatttttggcagtgtccaggtttttttgcgcttccttcagctgggcctgggtggcggaaccggctgcctgctttctccccatggcctcaaaggcggcctgtaaggactcaacccgcttttcctggtattccacgttctgcaccatctggttgtaggaattcatcagtgtctgggctgtcatggtaaaggtatccgcggatttttccaggctgcgggtgctcttttcactggtcatggtatccagctggctgtatatacggctggctgaggattttaacatggcggcattggaggcatagattccggctgtctggctgtcctcatcgtccatgtcctccgccttatcctccatgttgtcctgctcccgcttaagggtgtcccatatttcctggtaggcgtttatattgtcctcataatcctctatgctctcttttaaagacaggttcccctgtttcagcatttccctcagatttccgtattcaatgattatggcacccgctgtattccctgcggtttccagggtggtgctggctgctccggcctgggatatatccttagatatgtcctgagatgtgtcctgagctgcataggaagtccggccgccggctccccacaggcacagtaccattgccagaagaactattttaaccttttgggtgtttcctgtctgcgtgtttcccgtttctgtatttcccgttattatgttccccctgttcctgccgctctcctttatatcactgcggtttctcatttctgtcccacctcgtttcgttctgccatttcctgtgctttacacggttctattccgtctcccatatgctcacatcctatgacacggacgccagtccgtccaccgaccaacggtattccaactgggccttaagcagggccagcttctgtgtgcgcacattgacctgggccgcggcaaaggcggtctgctgtgttacataatcgttccttgtcgtggttccggctgccattttccgctccgccgccgccatggctgccgcctcgatttcatacgtattaagggcctgctcatagtcggatttggatatcatcatgctctcgtatgcattctttatgctggaagcagctgtctccttctggctctttaagctctgttccagactggttttgttggtgccgctttttgcattggctattttcttttcaagtattttaaggctgtagttattttccactcccctggatacatcttcctccaggttaatggctgtcatcccctccaggtccggctccggcacatcccctatatccacctgcgccccgtaggtccatcccagcataaggcagagagtttcttttgtctgccccagactgctctgggccgacagcagggatgcatctgccgatgtgacggcctcctgggccgacagcacctgagcctgggtagacatacccgcactcaggcggttaagcgtctggtcataggaggaccgggcctgtatcttattctgttccaggctctccagactgtatgtctggctccagtagcttatcatcagctcctgggcctccttcaccagacctgcttctgtcttgtcatattccagctttttgacgtccccgtcctccacattgtcgtctccctgctcccgcagattatctgcctgaatctggctgctcagataggaggaaaggcggctggcataatctaaatccgacgaatcaggatattccaggcttccgtatatatcatcggcggcatcatagtaatcatccgcgatatcgtccgcgtcctcgccccggaaatcctcatactccagctggttctggatcaccgtgttattgtatacatgaatcaaatccgctatctctgtgaattccagctgattatccctgagggaagcccactgttctgcggtataggcaaactccggggtgccggcccatgccgtcaccggcatggtgccaaggcacaataccactgccaggcatcctgcccctatttttccatatttcatatgattgacacctctttcttaaatatccagtacaacccgtttcttatcaccgttcataagcgcatagtagattggcagtatgaacagagccaccgccacgcccacgctgagtccgccgatgttaacaatggccagaccctgggtggtggaaccgctgtcccctatggccagggccatgggaatcatggaaaggatggtggtaaggctggtcatcataatgggccttaaacgtgtggcgccggcctcaatgagggctgtctttaaatccatggtcatgcggtattggttcactgtatccacatagaggataccattgttaacaacagtaccgaccagaatcaggaagcccaggatagacgtcatactgatgctgacccccgtaatctgcaaaagcccgaaggagccaatgaggctgaatggtatggtagtcattaccatgaaggaaaacttcggtgactcaaactgcgctgacagtaccacaaataccaggaacacagcaacggcaatcgcctggtacaaggctgcaaattcctcctgcatcattcggttcatggagttgacgccccttttgatggtgccgcttaagttggggtttatgacctcgctgtctatggcggactggacatttccccctgtataatctgctgtaatggttatctcatatgccttatccgtcttggaaatggaagccgggctgtccttataatagatttccgccacatccgtcagggccacatagcctccggaaggcttggagagtataatatccttcatctggctgaccgtgcggtactcatcctccgggtactcagccatcacgctgacctccctgccgtccacatccagggtggtcacctcttcgccgtccatcatctgctttacctgggaaccaatctgggatgcagtaagcccctccgctgccgccagtaccgggtccaccttcacggtaaccacaggcgctgtattttctatgctggaatggacgttcatcacatcgtccctggccgtcatctcggcaacaatcttgttgctgacttcctggagctcgtcgtaatctgttccgttaaggatgacttcatatccccggttcctgctcatgaagctcatggacgaggatgcctccactgtcaccgtacagttatccagatccgccatctctgtctcccactgctccactacctcgtcggtgctcatatccctgttgtccctcagataggctgttatggtaccgctgtcattgttatagcgcagcatgtaggattccacatccggatgcccctggacaatctcctctgcctgcagcagcatggcgtcggcattttccgacagcagccccggccttgtttcgatggaaacactgaccgttcccgtatcgtccgctgtcataagctcggtttccatcccgctggccagaaaataggctgcaatcaccaggattacagatgcaatcatgataatggccttgtggtttaaaagtccgggcatgatgcggcggtatccgttctgtatccgctccatgggccgcgacatcggcgcctgcatcctctcctggggcttatacgccatatatgtaaggggaacaatggtaatagccgacaaaaaggaggcgagcatacagaacacgataacgtatcccatggagccgaacatctgtcccgacataccctgcagaaataccagcggcaggaaaaccacgcaggtagtcaccgtggagcccaaaatggactgcagcacaatgtttgtacctgacagggaagccctggcatatcccagaaggcccttgtcctcctctgtctcgatggccctgaaacagctctccagcaccacgatggagttatccaccatcatgcccacgcccagcaccagaccgctcatggtaatgatgttcagagaaaaaccggcgctggtcatcagaatcagggacaccaggatagaggtaggtatggagcttcctacaatcagggacgctttatagtccccaaagaaaatgaatatgataatcatggaaatcacggctgccagcaccagggtaagggccacgtccttaagggagctgagaatgctgtccgcgctgtccctgacaatcctgatattcaggttctcgtcgtccgcctccaggctttcgataacctcctggacctcggatgacacatccatggccgtgctgctctgctgcttggtgatggaaatggaaatagtgtcctggccgttgtagcgcgagatacctccccggctctcctctgcctcataaaccttggcaatgtcctccagatacacaatttttccgctggaggtggtgatggggacttccttcagagcttcaatggtctcatgctccagggacgttgacacagaaagctccagttttccggatacagcatcgccggatgggtaggaaagatttgccgtgctcatagcagtggacacgtcgctcatggtcacctgatactgggccatctcatcggattgaagctcaattttataatattccgacttaccgcccatggcctccacctctgccacagaggaaatctgttccagcaaaggcaccacggtctggtccacataatcgtacaaatcctcctgggaaggatttgatatggaaagcatcatggtggttcccgcattgttattcatctccatgacagaggtctccgcgtcgtcagggagctggcggctcaatgcatccagactctgggataaatcattatatgcgtcatccatatcggtgccgtaatcatattccagcataatcatggccctgttttcgctggaagtggagctcatgcttttcacgccctctatggtccccacctggtcttctatgggctgggtcacaagttcatctatatcctcgggaccagccccggaataagacgctatgataatcagcatgggctgatccgtgtccggcatctgttccagcgtggcattaaaaacggaagaaataccgaataccagaaggcaaagcaatgccataaccgtggccaccggacgttttaatacaaaccttgtcaatcccatgggttatgcctcctgttccgcctgtgatgctgcatgtttgctgtcttccccgccgggtgctgctgtttctccggcctgtgtttcttcctcggaccggttcccttctccggactggaactcttctctggactgaaactcttctccggactgggttttctctccggcttgtgtttcttctctaaactgtgcctcttctcctggctgcacctcatccctcaaccgtattttcgccccctcatacaggttggagctccatgtgctcacaaccatgtcatcggctgacaggccggaaagaatctgggcatgttcctcatcctccagtcccacttccacctgggccatggatgcggtgccgtcctggtacagataaacataggcattgcccccgctgtaatagatggcatcaatgggaaccaccattgtatccagtgcccgttccgtcacaagatttaatttcaccgtgcttccggctgcaatctcctgtgtgttttcaatctgggcctttaccttgaacagccctgtatccctgtcaaccatggagtttatttcgctgatatatgccttgtatgtagttccgttcttctggatttccagctcatcgcccacattggcgttctgcatcatgcgctgggtcacatagaaggagactatgttctctccctcgccggcaatcacacacaaatcctgggactggctcaccctgtcatacacctccacgtcaaagctttcaatcttcccattgataggagcggtgacggaactgtactgcacctgtctttcgtaagccagtttagcggactcatactggagctgcgcggacttcaccgcattgacatactgctcgtattcctgctcagacaaatcgccgccgctgtaaagaatctgcattcttctcaggttgctctgggcctctgaaagagatacagatgcagcatccatggagttctttgccgtctccacctgctctgtatcaatctcaaacaggacctggccctgtgtcaccatgtcccctgccttcacatataccgccgtgacgtcacctgctgcctttgcatagatatgaaccacatcagaaggctccactgtgccggtaagccctgtggtaaggataatatcgccggaggacggctgttctgccctcaccactgtgacagaagcctcctgtcccataggcatgccgccctttgctttttttcctcccttcattacaatcacagccacagccagtatgacaatgattccggctgcaatgcctatctttattttcctgctcttgctcatatccaatctcctttgctggtttactcaactgattcctaatattaaaggttgaagattaattcaacattaacaaaacaggtatgaatgtcatttatttcacgtgattctgtgaattttttgtgactttacctgatgtctgatgcagcagcataagctgtccgaaaacagaactaaaagacaggcaggtacacacatacggtacctgcctgtcttttagttctgtttggacttgcgatggaggcgatgacagccaatgtgaattaaacggctccattgacaccggcatccctcttaagcattttttcataagcatatttgacactgttatcaaaccatatggttccgcagtagtcaaaaccgttcttttccaagacatgcctcataatagcatttttctcatcggtgtcaacccgaacgctgtaaattccattttgaatacacagctcttcaatgagctgaaacgcaatacttgctataccatgcccacggtaagccccggatattgccatacggtggactaccgcatagggaagatcgcttttccagctgccctgcagcgtttcataggacgcctcacccgcaaaatcaatgcagaggtatgccgcagcgttagaaccctcctcgataaaatatccccgcccatgcgccaggtccccgatgatggtttccatatccgggtatccggtctgccactggtcaatgccctgcgattttaagaactctttggcttcatcgatcaacgccattgctttctctgcttctttcctatctgctgactgtaaaaaaaatcgttccatacgttgtacctccgtcattttatttttgactctcctgaattttcgttccacaaaaccatgtggcaaggaaaccagctttgacaaatcgcacttgccctccttcctcttgtctgttataataacacaaaacaatgcagcgaacaaatcaaagtatttatatatatagttcaattttttcgaagtattggaggaaaacccatggatcttaaatgtttaagaacattccgcacgattattgatgaaggcggtttttccaaagctgccaaaaagctgaattatacacagtctaccattacgtttcaaatgaatcagcttgaacgcgacttatccacaactttatttgaaaaaatcggcagaaaaatggttttgacaaaagcaggagagcatctgattccttatgtggatgacattctccagtccgtggacaagttatcttttttaggcgaacatttatcagaatgccagggagatatccagatcggcgttggcgaaagtctgctatgttacaaacttcccgctattttgaaggaatttcacaggcaggctccgaaagcccgtttgttcctgcgctctatgaactgttatgatattcgggatgagcttttcagcggcggattggatttaggcgtattttatgaggatgtgggaggttttggctcgaatcttgcggttaagcctttaggtgattatcctgtggttttggtggcgtcccccgaaatacaaaacagatacccggattttgtgacaccggacagaaccattccgctccctctcatcatcaatgaaccgaactgcattttccggcagatttttgaacaatatcttcgtgataaatcaattattctcgaccataccattgagctgtggagcattcccacaatcaaaaatcttgttaaaaacaatgtgggggtttcctttcttcccgaatttacagtaacagaggaattaaaccatggtgaattggtgaaaattccaaccgctatttcaggcacaaaaatcactgccgtctgcgcgcaccataaaaacaagtgggtcagtccgctcatgcagctgtttatcagtttatgtgattcggtttcctgcggcagggagcggtaaccggcctctctgcgtctggtatcgcgattgtaaaacataaacatcctaaataaaaaaataaatattctttcattttctgatgattcgtttatgtttactttataaaaagatgttatatatgtataatgaaatgtagcagagggaggtaatggaacatgtttcagatactggttgcggaagatgacaagaatacccggcggctgatggaagctgtactgaaggaacacggctaccatcccatcctggcatgcgacggcctggaggccttgaaattattagatacccaccatgtagacctggttatcctggacatcatgatgcccggcatggacggctatgagttcaccagacagctgagggctacagattacaccctgcccattctcatggtcaccgccaaacagctgccggaggacaaacggaagggattcattgttggaacagatgactatatgacaaagcccgtggatgaggaggagatgattctgcgcatccgggcccttctgcgcagggcccagattgtgaacgaacggcgcatcaccatcgcagatgtgtgcctggattacgactccctgaccgtaagccgaggggatgaaagccagacgctgccccgcaaggagttctatcttctttacaagctcctgtcctatcccggcaagatattcacccgtatccagctcatggatgagatatggggcatggaatcccagtcggacgacaataccatcaatgtacacattaaccggcttcgcaagcgttttgaggattatcccgagttttccattgaaaccatacgcggcctgggctacaaggcggtgaaacatctatgagacacaggagaaaccgtaaaccactgggtaccatgaccctcatactgaccgcaggtatcttcttaatcatgctcacggtcatgaccctgcagggatttttgatgtacctgtactggaagattttctaccaggctgatattcccatcccccagttctggcgccccattcccctgctggccgtgctcagcgccgtggttggcgccggcctcaccctgctcttaagccgcatcccccttaagcccatccgcgacctgattgaggccatcaaccagctggcggacggcaacttcaaggtgcgcatccacctggacctgaaccgtgaatttgaacgcctctccgaaagctttaaccgcatggcccaggaactggagaacacggagctgctgcgctctgacttcatcaataatttttcccatgaattcaagactcccattgtatccctgagaggctttgccaagatactgaaaaatgacagactcacaaaggaggaacgggacgaatatctggatatcatcataagtgaatccaaccgcctgtcccagctctccaccaatgtgctgaatctgtccaagatagaaaaaatgagcatcctgtccgatatggaatcttttgacctgtcggaagaagtgcgccagtctgtcctgctgctggaatcaaaatggcagaaaaaggacctggaactgtttattgatatggatgaactggaataccgcggaaataaggcgctcctaaaccaggtatggattaacctgattgacaacgccatcaaattttcccctcagaacggaaagataaaactgaagctgcacaggaagaaagaccaggtggttttccagattctggacaatggatgcggcatggatgaggagacaaagaaccatatattcgaccgtttctaccagggagacagctcccatacggcagagggaaacggcattggcctcacggtggtggaaaaaatcgtacacctccacaaaggtcagatccgagtcgtcagcgaggccggtatcggtaccacctttacggtgaaccttcctattatcccaccgccttcggttctgtaagtttctgtgaattcttccggcgatttttccggtgattttctatgtgaatttccccggcgtgtatttcgccatgaattctgccatgagtttccccggtaaaatttctttgacataccgcacattttctgatatgatgactttactttacaaaagccactgcacgaagcccggaaagaacccgctaagtgccggtgacatgtatcgcatggaagcgtctgaaagacaggcgccaagtgttcataacaaggagggcgtttgatgtatttatccattcgtttaagataagcagcaattaaataaaacctgatatggtttttttgttgtgcctgttttacggatgagatgcagatacgcctgatatatttttatgtaatatgtgaattgcccgccgctgatccgggggacagtttgttttctacatacaggcaaggcagatagaaccgtaatggctttatctgccttttcatgttgtatttatattgtatttatgctgtatgtatgctgtatgtatgctctatacagccaaaacaggctttgggacaaacccaaaacaggacgccatgtcaggttagatacagaatacggaaaggattttttaatatgaatgattattcaagatggaaacagaaatttctgaccattgcagcaggccagactgtctcccttatcggaagctctgctgtccagttctcgctgatttggtggctggccagcgaaaccggctctcccatgatgatggcgttatccggcctggtggcatttctgccccaaatcttcctgggtccctttgccggggtgtggattgaccgcctgaaacggaagcatgtggccattgcagcggatatgttcatcggcctggtagccgtggtctttgctgtcctcctgtggatgggccatcctccctactggtctgcctgcgcggttctgggcattcgggccctgggaagtgtattccatacacctgccatccagtccatcgtgccgcagctggtaccgccggacaagctggtccgggccaatggctggaaccagttcatgcagtccggcgcctttatgctgggacctgtcataggagctgccatgtatgccgcgctgccgcttccggtcatcctgctgactgattttataggcgcatgtgctgccagccttacaatggcggtggtaaccatccctgaaccggaacacagccatcaggaggcccctcatttaatccgggaaatgaaggaggggcttagcatctgcatgagcgaccgcaggctgatgaagctgactgcggccgcagccattactatggtattttatctgcccctggcctcctattatccgctgatgtccagcacttattttaaggccagtgcatggcatggaagcgcggtggaattcctctatgcccttggcatgatggtatccgccatcatattcggcagcctgggcaaggtaaacaataaactgaaggcctcctacctgggactggccggaagcggcatcacctgctttatctgcggcatcctgccctctgatatgtgggcctggtatgtttttgcagcgacctgcatgttcatgggcggggccggcagcgcctacaatattccattcgtggcctatctgcaggagaccatacctgcaaaagcccagggacgggccttctccctcttgggaagcatcatgtccttagccatgcctgtggggctcctcatatccagccctgtagcccagattttcggggtaaatatgtggtttttggtatcgggaatcggtattctggctgtggtggctgtatgctggctttcaggaaacgattaagggaaggcttatctttgtcaggaaaaaaccggcttcccggccgctgtaaaaactaccgccatggtccccaatgattttagcgcaggtcttaaggccgattccggtgctctccttttcctgcgcgtcctctgccacataattgccaaaacagatgataagacaatccgcccgctgctgataggatacggttaccgggcggttcctgtccgcgtatttgagcagattggaaaatatatttccgaatacccggcggcacagattaatgtccgccaaaagcctgcaattgatttcatcggaactgcgcctgatgtcaaagccctcgctctccatgtcaaagaggctctcctccacgatttggcccaggaattcagccccattaacctcctctgcctcaagctcttccctttttcttccataaacaatgaaatattcaaacaatttatctgaaagttcctttatctggtatgccttatcccgaatggaattcagatactttctctgctgcccccggtcttcccccttttccatctgaagtatgtccacataacctaacagggacgtcagaggagtgcgcagatcatgtgacatggcagtgaccagctcacggttggcctttcccgcttcctcctctttctgctgccgttccttgatggcacagcgcatggcatcaatttccgctgccagggaggcaagctcatccttcccctttaccgtaatccggtaatccaggtccccgccttttaatatctgtatctcctgttccatcaaatctatgtacctgatttttccgcgaatcagcatgaccagcatcagcgcaaacactgccatggagatcacgcctcccagcacactggcggcagcataatatccatattccacataatagctgacccctgcctgggcagtcccgtctgcaaatttcacctcataaagccatgaggtatcttcccactcattcatttccggaaccataaccatcaccttggcgtcattgctgtaccgaaacctgccgtctttatagatggttatgagaaggttcttttctcccgacgcccacttgtccagcattttaccgtcattcgtggacagtccgttctctgtcacatacgcctgaagccgctccacgcaggcctgttccctcagaatcattctgtcctcactgaaaagcacacggtccaggataccaaaaagcagtgtattaagggccatgtagagagccagtgaaacaagggccgacgccactgccgccagggtaagctctgtccccagcctgctgattctcctgctcttactcaatccgatacccctttccccatacattgacaatatactttggattctttgggtccgcctccagcttcctgcggagattcctgatatgtaccatcaccgtgttattggcgctgtaaaaataggcttccccccacacgctctcataaatattctcaatggtaaacaattttccccggttggacgccagcagtaaaaggatgcggtattccaaatccgtaagaagaatttcccggctgtttttcatgacctcattaaatgatttctgaatgaccagatccttaacagttatggattcctctccatcctcctccttgcctttatacacatggtaccggcgtatcatggcctttaccctggccgccagctccgcataggaaaatggttttgccagatagtcgtcacctcctgccccaaatcccatggtcttgtcggagtcctgggtgcgggccgtgaggaacaaaatgggcgtatttaacttccttcgtatctctgcgcaggcagaaaatccattacgtcccggcatcattacatccagtataatcaggtcaaatgtatcgtctgccgcagacgcagcctgctccccgttctctgcttccacaacctggtatccctcactttccagcaggattctcactacctcccttatctccggatcgtcatctgcaaataaaatcttccgcttgtccaacctgacacctctctttataatggcgtgtttcatttttaaccatccgggtatggatgttccgggatggccaaactatcttcattatatctcagatattctcttacttccaccaaatagtcctattgattcaactgtttttgtcccttcttccagctgttctttcccgtcagtcatgcttgattgcctccagcgctgaaatctttactgctttgccggccggataataacctgcccccacgcccactgcaatggaaaacaggaccgcaaacagggacagccaccacggtatcacggacagcctggaaggaagcaccgccatgtccgcttccatggctccggccatggatgaggacgacattccttcggaggtcatattcatgacaaaggatatggcataactgaatacagtccctgtcactcctcctaacagcccgatgcagcccgcttccagaaggaatatccttcttatgtccctgacaaaacaccccagcgacttcataactcctatttcccttgtccgctcagatatggacataatcatggtgttggtaattcccagggctgccacaaacagggaaatggctcccaggccgcctaacatcatctgtttctgtctggcctcccgctccataggctttcggatggtctccatggagctggtccgaaagcccatacgttttatttccgtctccacctccgccacctggttcatatcctttaccttcaccagggcgcctgaatatccctttttccactccggcttcctgccgctcagcttagcctgctggtccaataaggtcttaagcatttccaggtccatcacaagccccatggatgtctcctctccttttccgtaatcctccttcattcttcccgcggcttccagctggcgcgtgattttcttatcatcctccttatcgctgctgatatccagcgtataggctgttttcatggaatcaaaatatggctggggcttcacaggcattccactttcatccaggttatcatatccgctgtacatatcaaccgtgtttctgccggaaggcctcttggtgtcctcaaacatataggcaaaattctcccccacaaagacaccatcccttccccccttgtcccaggtcccgtccgtcagcttgtatcccatggcttcggctgcctttacgtcaatgcccacaatggtggtgtaggcggacttgtaacgccggtttcttccggcatacagggtgatggggatgttttcagctgtaagttttggcgtgactgcctccactgatttcatttcctttaaacgccggattgcctggttattcagctttgccgagcggctccctttgccggccgaatatacattgataatggtcagatctcccatctgggccagcatgttcttctgtgcctccttcattccgattccaatggatatcataatgaccacggagcagcagcctatgatgactcccaatacagtgagaaaggtcctgcttttatggcgggtcagattctggagacatatggtgagtaagtcctttgttttcatgttttatcttcctcattttccgatggctgatcacggctgtcctccagttcattccggccatccaagacctggctgtcctccagttcatcccagccttccaaatcctgactgtcctccagttcatcccagccttccaaattctgaccgtcctccagttcatcccagccattctgctcctggcaccggctgcggtccttcaatcctttggctttttttctcttaatccacagaattcctgacaccagtgctgcagttagaataccggccatcattttccagttcattttccttcccccatccatttctccgtccatcatatctgcgccgtccgtttcttcagcagctccttctttcacctcgaatgtcacaggaatctccatggtccttatctccatggactcgtcctcatatgtcacttttaccctgccctcaaaggtccctgcctttttcggggttgctataaaatcaatggtcccgctttttcccgcatcaaaattccccagattcaggcttctgtcaattacctgtatgtccccttccaaactggcttccacattgtacacctgtcctcttcccttgtttacatagggaagcgagatggtggtctcctcattctgacggatttcctccacaaaagagggcgggctcacctggaaccggtctggctggtaaaccggcactgcaatggtttctgcggcagtagactgttttctctctgttttatcaatgtactcatatttgcacgatatggttatcttaggggactgtaccttggaatcctttgtctggaacaatgcctggacatccacctgctgtgcttttttctcacccggtcccatctttggaacataaaatgtgttggaggacgagttgatagataaaccttctcctgtttccagcgaaatgaccacgttttctatgggagacacctgactggtattcataaactccatgttcagacgaaacacctggcctgctgagactttatctccatatgtataattagtcagtatgatatttggcgtgggggctcccggagtggctgtcttgtaattggtaggcaccacgattcgttgggaatacgtaccctggaccgttcccttatctgtatcataatcaaatttcaaggtgatacccaaaagctgggatgctgctgacgacaattcggatcccgccttaaggttcacagacacgtccacggactgtcccggccctatatccccaatctgccgtgtatcggttgcctccagaagagatatctggtcatttggctcaaaggtagctgtaagattccgtattcctttgactgtgtcggtattttccagttttaaagtaatctgaaacggctggccggaactcactggtcccataggtcccctgtctatgagcagcacgggctgtcctgtagccgtgcctccttttacaggcagaagcaccttttgcacagaggcagccgatgtaagctgtcctcctgaataatagttgtattttaactccaaatcaataagctggctgggaccggatatatcctgtcccgctatcagattgaatttaaccagctcggctctcccagtatccaggcggctaacgatccttgtgttagtgtcaccgcctatgaacagggaacttcccggcgatacatttaccaccatatcctcgatatccgcatctttactggtgttctcaagctccacttccagcgtgaagtggtcaccggggccaacgggattttgcggcgagattctcctgactcttatgattggctgccctgtggtacttcccgtatccccattttccctgggagccgactcctcgcattccgaaatatttacttccagctgttcagagggaattccggaactcttaaatcccaccttcagcctcagaacatccccctttcccgtataagtaagcctggtaaacgtcactgtaaactccaggtcgtcctccttgtccgatgtgatctttacctttggattttccccattgcggaagctgtcgctgagttttgttaccgttactccccgttttcccacctcacttgtcttgattccattgcttcttacattgaccaccacctttgcctggcgccctttgcgcagcacatccagggtgtccttcgaaccgcccggtgcaaaaatctcatactcacccacccacaggcttccacttcccggggcaccatcgtccggattattggaatcctcctttcctctgacccgtcctccgctgccctcctggctgccgccgtcctgagccccgctgacggaatcagcccctgaaccgcctgtctcactgcccatctcacggcccgtcccactgcccggctgggatgttcccgctacaccggtttccgttccggcactttctgttgtgctgtctcctgctccgttggctcctgctccgttggctcctgctgctccggcttccattcctccagtcccctctccagccattccgccttcgtttctctcattaatcccttctgcggcaatcgtttcccgccccccggaactgtctgtctcctctgccaaagcatttccgcacattcctattatcatagcagttgaaatcatcactgccgctgcccgtttgagccttcctgttatctccatcctcactgtcctttcctttcatctcccgttatgattccgtccaccagggtcacgattcggtccgcatacctggacatgcccgggtcatgggtcaccagtatgatggtctggttaaatcttctggcaaagcccatgaccatgtccatgatttccgctgttgtttttgtatccagatttccggttggttcatctgcaaacactacctcaggtctggacacaaatgccctggctattcccgctctctgctgctggcccccggacatctgggagggataatgatgaagccggtgtgaaagccccacacgtttcagcatttcttctgccatggcctcccgcctcttccggtccattcccttaaacatcaggggcatagccacattttcaaccgctgtcatggacggcagcagattatatgactgaaagataaagctcatatgttcctgccggaaagcggccagttcctcctcattcatatccgatatatttttcccgcggataaacacctgtccttttgtgggtttctccattccggccagttgattcaaaagcgtactctttcctgaccccgacgttccgaaaatacagcagacctcgcctttataaatcctcagattaatccttttaagggccaccacttcctcgtcccccatccggtaaaccttgcgcacatttttaacatatatgattggttttccatggtccattatcttgtcactcctctttttatgtgtctatgatagaaaataatcccctggaaaatacctcatataaatcttaagaaatcttaatttcacacatgtctgtattttgggatgaccttttgctataatggttccatatgaacggataactgccggaaaaaggaggagaggaaatgaaaggcgcgattctcgaaaaaggtgaaacaggttacacctatctaaaaaaactgttcctttcaatccgccacgcccagaaggactttaactggctcatcaccgactgtcagtgctgtacccaaagcgaagccttttatcagagaatattccagtatgaccgatatggctggctctccggagaggagctgacccgcatggttgagacagaggatttccagtggatttgggctgttctctccggcttcccccggcatatctccctggaccaggtactggaatacgacctgccctatgctgacatgtacaccggattctggaccaatcctgtctccatccagcaccccctggcccaggtggaaattgttccctgggacagttcctgcacccttgtcataagccggaatcacaggatcgtgtcggatttcatggatggttttccccttagcagggatttatctctgtacaatgagcaaaagggaatctttgatgagtcggatgaactggagcgctggctttcgcagcacaaatagggccttgctccaaaatcctctgcccataggaaaaaagcccaatacaaaaagaaactccattccggaaggaggtctaattccggaatggagtccgttttcaggaaaggagcacaatattggaacatacattttggaccgcactggacaaattagtggaacagtcagagattatcatagaccgtccaaaggggtcggttcatcccgtacatccggactttatctatcaggtggattatggatttctgagaaatacatcatccatggacagggagggcatagacatctgggcaggcagtgaccatacggccgggattgacgccatcctgtgtacggttgatttgttgaaacgggattctgaaatcaaaattctcctggattgtacggaggaagaaaagatgttgatatacaaagcccacaacgatacctcatgtatgaagggcatcttaatacgccgaaccgcagggatttcttataaaccatgagagaattatcaaaattaccaacttaagcagtcaggcccattgagccgcttttatgaatacctctgtcaaaaataagattcccataagtaattattaaatattttcatattttattaagaggctgctcaaacttttgacatatctgaactgtatactttagtcatagatagataaaacatcctgattaatacaatatacagctttttcatacccagccggcgcgaccccatcgtgccggctcctctccttttcagggatacataatcctatcctcccgtactcaccgtcttataccactgttcatcccaaaatccccctttcccttctttcctatatccctattcaaatgaacagccatgaataaggctgtcatggcggagagaacatctgccgccggctgcgcatacaggatgccgtttaatccccacagcgccgggaaaaccaggataatgggaacaaaacaaattccctgtctgcatgccccaagaacaaacccctcccctgcttttccaagagccaggaacagagaggaatacacggtgtagaatccaaataacaggaaggataatccattggccttaagagccttttgtcctatacggatcatttccatgtcgtcctttgtaaaccgtgaaatgacagggccggagaaaactgccatagtaagtccgaataccgcgcagaacagggtggaccacaccaccgatatcctgattgcctcatgaaggcgctcatagttccctgccccgtaattataaccggcaatgggctgaaatcctttgatgaatccaaataccatcaggcttcccagggaaatcattcttgtgacagctcccatcccggcaatcacagagtccccatacggctttgcctgcatattaatcatggtgatggagaggctggtcagcagctggaaggccagagtgggaatccctattttcagtatctcagacatgatttcattggaaaaacagcagttcctgaaacgaaagctgaacatgctccttccgctgataacataatacagatagatcagggtggaaactgcctgtgaaatagccgtggcaatggctgctccagccactcccagcttcaggacatagataaaaacaggatccaggaccatattaaacgcagcgcctgtcagcagaacgcacatggtggtcctggctgcgccctcgctggtcacaatattattcatggtgacgttaaacacattgaatatggatgacaccacataaatacccgcgtatgtaacagcatagggaagtatactgtccgttgctcccagacactttaacaggggcttcaaaaaaatgaccgcgcaaaggatgaccgccgctcccacaaaaatactgctgtacagggccgtgcttgccgccctgtccgcagtctccctgtccccgcggcctaacagtctggatatataggatgccccgccgtttccaaagagtaagcccaatcctaccacgacctgccccaggggaaacgcaacggaaatcgcccccatctgacttgtccccagacctcccacaaaataagcatccaccaggttatacagcgcattaatcatcattccaatcatggtgggcagccccatggctaacagtgcctttggtatgggcgcgtttcccagcagctccattttcttattacgtccttccatcttgtactctcctttcacttgacacaacttgtaaaatatagtactataaattatagcaaaatggccatagggcacatgatactataatttatagtacttgtcaagagaaaaaaggaggtcgccatggcaaccatagatttaattgtactgggtattttaaaaaaggaatccctgagcgcctatgatatccagaagctggtagaataccggaacatttcaaagtgggtgaaaatcagcaccccatccatctacaaaaaagtaatccagctggaagaaaagggatatattaagagcaatatgataaaagaaggaaaaatgccggaaaaggcagtctattccctgacagaagccggtgaacaggcatttgaatacctgatgttggaaattgcgtccaaaccaatccacatctttctggattttaactccgtcattgtaaatctgccaagcctgtccccggacaatcaggcagattgtctggacaggattgaacagaacgtgaacattttaaaaacatacctggaagaaaatatctcgctgaaagaacatttgccggagattcctgagacaggtatggcagtgctgcagcaacagttcatcctggcccaggcaattgaatcatggattgcctccctgagacatactttgccggaatcatccgtccatacagtgctgcaaagcaggaagagttaaggcaaacaccgctatccccagtgttgccccgccggatatcagaaaccagttctcgattcccagcggaccggccagggctcctgacagaacaagccccagcggcattgccgccatgctgatactgccggacaatgacagcgccctgcccaggtattccccctgaattttgatctgataaatggatgtctgtaccccaaaataaaaggggacagagattcccatgaaaaatgacaggaaggcaaagatataaaatccttgtggaggcagcaggccggttatcagggtaccggctccatatatacctatggacccggcgattgcctttatcttgtctatccggccgccccatatacccagggaaacagagccaaccagggtaccagctgcaaaaacagtctccaccagccccgattcactgacactgccgttaaaataagacatggtaatcagaggatacagggtccctatgggaaaatatatgactgcatataatgcgccaatcaccagcagctcccgcattccgggtacactgcgcataacgttgtacccctccttgacctctgccagaagattcgttttttccttatcttccctgaaaatttccggtatatccactgccgccagggtacacactgcaaaaaacgctcccaacacatccagcatcagaatggctttcagcggaaacatactgtacaatacagccgcaatggcaggactggctatcatggacgcagattcaaagctctgtgaataaccggcgtattttgtcagctggtcctttggtaagatggacggcataatagcctgaagggacggggcataaaacgcattgccaatgcttcggatgaataatacaataaaaatcagccagatcggaatgtccccccaaatacctgaaacagccagtgccacacaggctgaggacatcaccagatccgagcaaatcatgattttcttcctgtcatgctggtcaatcagcacgccgatgaacattcccagtacggcctggggcaggaacccggccagcgttgcaaaggaaagaacggccgctgactttgtctttccggttatataccatatgattgccatttgtacaatagagctggtcagggtcgatataccctggccggtccaaattacaaaaaacttctttctccatcctgcaaactgctgttccatggttttttccgctgcctcctctgctgctctttcattgtcaacgttacgctgtcacatggtttctctccgtcacatggtttttctccgtctcatggttctccccgtcacatggtttctctccgacgcatattttctctccgccatatatcatccatcctccggaattcatatcccctcccgctcaaatatctccttcagcctgagggcgtcctccagcgtattcttccatccatcccgtttcatgtccacgcgtccctccgccgataccaggacctcttcctcctccagaagcattctctgcaggtccggatgttcaaaggacgctgcgccggtcagatatccctggctgttgaccacacggtgggccggaacttctccggccagaccgcggttcagcgcataacccacctgccttgcgtttttcggttttccgcagagcagggcgatttgaccataggtagctacctttccttccggcactgtcctcaccgtaattcccacccgtttataaaaatccatcttccttatcctccggcagcagccatgcccatttatctcacttattttttcggaatccatttctatatatctgaatcctgctcacaaaaagtatatatatattgtatcatgaagcataccatttaaacagacaaaatacaaaacccaaaaagcccccagggcaaatccaaaaacacaggactgccccgaaggccttcttactatttcatatacatctgctgcatttatttcccctgtccgtaataagcattgggcccatgcttgcgcatgaaatgcttatcctgcatacactggggagctggtcctgcctggggattgatgagttccgtcatgaaattcatcctggcaatctcctccagcacaacggcattgtggacagcctcagccgcgtccttcccccatgtaaagggaccatggtttttacaaagcacagccggaatgtaaaccgggttcttgccctggaaggtctcaatgataacccttccagtattcatctcgtagccttcctcgatttcctctgccgtcaggtttctggcgcagggaatctcaccgtaaaaatagtccgcatgggtggtgccgtagcagggaagagccctgcctgcctgtgcccaggccgttgcatgaggggaatgggtatggacaataccgccaatctccttaaacgcattgtacagctccacatgggtggctgtgtcggaggacgggttcatctcaccctccaccttattgccctccaggtccatgaccaccatatcagatggctttaacacgtcgtaatccaccccgctgggctttatgacaaacagtcccttttcccggtcaattccgcttacatttccccaggtgtaggtgataaggcccctgcggggcagctccatattggcttcatataccttttgtttcaattcttctaacataatctgtatccgctcccgttcctgttaatccttctgtgctccacaacttagtccttcttgctcacagcttaatccttctttctcacagcttaatccttcatatgctccacagcagccttctcaatggcaagcccctctgcataccgcttcatgaatgcctcgaatccttccacatcctctttcacaggctccattctggttcccttatccccggcaaaaaccttgttggccaggtaagcgtccagggtctcgccctcctgcctgcaccgcatgtaggaggccagcagcgcaatgccccaggcaccgccttcaccggctgtctccatgacagacaccggcgcgttcatggctcctgccaggattctctgtcccacaccctttgtcttaaagagaccgccgtggcccagaatactgtccaccttcacatgctccttcttaagcaggatatccatgccggtcttaagggcgcccagggatgtatacaggtgtactctcatgaaatttgccaggttaaaccggctgtccggcatacgcacaaacaggggacggccttcctcaaagtgtgtgatgtgctctcctgagaaataattgtaggccagcagtccgccgcagtcggaatctccctccagggccttgttgtaaagggttccaaagagctggttcatatctgccttcatacccatggcctctgagaactccttaaacaggttcacccatgcattcaaatccgacgtacagttgttgcagtgcaccatggctaccatatcgccggccggcgtggtcaccagatcaatctcaggatatacgtgctccagttccttttccaataccaccatggcaaacacgctggtaccggcagacacgtttccggtgcgcacagccacgctgttggtggccgccatgccggtgcctgcgtcgccctccggcggacacatgggaatgccggctttcaggtttccggatgcatcaagaagctttgccccttcttccgtcaggacacctgcgtcctctcccgccaccagagccttgggcaggatgtcccgcagcttccatgggaaattctctcctgccaccagttggtcaaactgttccacgcgcttctggtcaaaatccctggcatggatgtccaccgggaacatgcctgccacatcaccaatgcccagaacacgtctgcctgtcagcttccagtgcacatatccctccagtgtaatgaggtagtcgatatccttcacatgctcttctttattgaggatggcctggtagagatgggcaatgctccatctctgagggatattgtaccggaatacctctgtcagcttcccggcggcaggacctgtaatggtgttcctccaggtgcggaagggcaccagaagctcgccctctttatcaaatgccatataaccgtgcatcatggctgaaaaaccaatggaaccaatggtggtcagggtgatgccgtaggtttccttcacatcctcagccattttgccgtagcagtcccggatgccggtccagatatcctccagggtataggtccagatgtgatccacatacctgttttcccaatcatgactgccggaggcaatgggtgtgtggtcctcaccgataaggactgccttaatcctggtggagcccagctctatgcccagggaagtatttccatgctcaatctgttcttttatcttatttatatctaaactcatgaattgcccctccacttactcattaaggagcgggcctgagggcacataaaaaatatgctcccagggtccgccccatatatcctgttcctaatccgcaggccgcctcaaaccgccgcagcttccggacgcaaagcattctgcctcatgcctacctgtaagctgccgcattccagcgaagctcgttcttaagagcgcggatgcttgtgtccttgtcaatatagactgtctcaatacccatggcatcagcccagtctcccatctgctcggccgtcaggtcataggagaacgccgtatggtgggcgccgcctgccagaatccagctttctgccccggttgccaggtttggctccggcgtccagaacgcggttgccacaggaagcttaggcattggcttttctgtttttttgcactccacatcgttgataatcaggcggaaccttgtgcccagatccactaaagatgtggcgataccatggcctgtcttggatgtgaatacaagtctggccgggtcctccctgtcacccatggacagcgggcaggccttgatgctgatttccccgtctgcaatggtggggcatacctccagcatgtgggcttccaggattccctccttgccgggcactaagttgtatgtataatcttccatgaaagaggttcccttggcgtccttcatgccctgggtcataatcttcatcagcctgaccatggcagccgtcttccagtcgccctctgcgccgaatccgtatcccttttccatgagacgctggatagccagaccgggaagctgctgcagctcgcccaaatccccaaagtgggtaacgatagcgtggtaatccttttctaaaaggaacttctcaaggccggcctcaatctgggcctgtaccgccacatggcgcttaaattcctccggatccctgccttccggcaggatggtgtacttgctgtagtactcgtccaccagggctgtgatatctccctttggcacagcctttacatactcggccagctcattgaccgggtaagcgtccacttcccagccaaacttcatctgggcctccaccttgtcgccttcggtgacagccacattcctcatgttgtccgcaaaccttgccaccctgacatggctgctctccatgatgcccacagcagtgcgcatccatgcggctatgcggcccaccaccttctcatcgctccagtggcccacaatgacctttctctctatgcccatgcgtgtcaccatgtggccgtattccctgtctccgtgagcggactggttctcattcatgaaatccatgtcaatggtatcatagggaatctcctggttaaactgtgtatgaaaatgcatcaggggctttctgtattcctgcagtcccaaaatccaggacttggccggtgaaaatgtatgcatccaggtgatgacgcctgcacactcctcatccgcatttgcctcgttaaacgtcctgcggatcagctcattggtaatcagtgtgggtttccacaccacctcatagggcaggatgcctgatttattaagactgtccacaatgattcccgaatgctccgccacatgtgccaggcactcatctccatagagatcctgtgaacctgtacagaaccagaacttataattctttactgctatcatatctctcatcctccttaattgtcagcccctcaggccgctgccggccggttggcgcatcgctgtctgtcaatcttctgtctgttcttcttcctcatcatccggaatctcgccatacttaatatattcgccttttatgaatttcttaagggaccagccggccagaaatgcacctatggcgccaaaaagaactgcacagccaagctgtaccatcttgcctccgcccgcaggttttaaaaactcctgcagcaggccaaaggccaggtatacaagatagcctcctgccgccagacgcagtattacggttatctgagttggtttcgcggcattttcttctttctttgcaccggtttttgctcccattacatttcctccttatgcggctgtttcaggacctttaccgaatcccgctcaatgatatccgaatcaaacagatagttaccgtcaaaatagggattttcaatcatacttatcatgttctctgctgctttcctgcccagcgcctccatggggtgcgggaaggaggtaagctttacgccggccagggttgccaggtccgagttgtcaatgctgacaacagacagctggtccgggatggcaatgccccgcttctcgcaaagtcctgacagcacataggccacctcatcgttatagcataccactcccgtacagctttccagtctgcgaaacagataatccgcccactggtccaggtccagaaaatcttccgtgtccagccataccacattggcatcctttaccttgattcctgcctccagcatgcctgacagaaaccccttatacctcaaatgcccctgtccgtcatcgcttttgaacacgcctccgatattctggtggccgttcttaatcagatattccacagcctttttgcccacctgctcgtcgttcatggacacgcagggcagctccagctccggataccggctgttgaagaacaggatcgggattccccgttccttaagctcctggtagtaatgcagatttggattggggagggcgcttttggccggctccacaatcagtccgtctataatgtctttgtcgatcaggttattcaatatgtcctgttccctgctgacccggttgccggtaaaggcaatctgggtggtgtaaccttttttggagagaaccctctcgattccccgcaccacaggagggaaaatatagctgtccacataggtactgattacagcgatgttcatgtaccgctcctggcgctccgccttgccgttgccgcccacatacgtaccgcttccccgcacccgtaagaccagcttctgctgctccagaatatccacggcatggcgcaccgtctggcggctcagaccgaaacgctcgctgagctcattctccgaaggcagcttttcgcccaccttcaaagccccgctgttaatgttgtccaacacccagttatagactgctttatatttcagctcctgtgtacccataatcaaaacctatccttttttcctctttgataacaagtctaccgtaaccgcacctaaaagtacagcgccttttacgattttctggatgtcggtggaccatccgtagagggacataccattgttcaggatacccatgataaaagcacctaccacagctcctatgatggttccgataccgccgctggtagccgcgccgccgatgtaacaggaggcaatggcatccatctcaaaaccgtcgccggccttgggggttgcggaggcgttacgtgcggaaagcacgatacctgcaatggcacttaaaatacccatgttggtgtatacccagaagaacactttctcagtattgataccggaaagctttgccgccttggcattgccgcccagggcgtatatctggcgtccggcaacggtcttgctggtgatgaaatgatacaggcccaccagtacgcccatgatgaccagcacaaacgggatgccgttatagcgtgacagcttgtagaagaagaaccatacgatcatcagaatgacggcttcctttataataacctgccacaatggattggttgagaaaccatattttttcttggtattaatgctcttaagctctgccataataaccagtaccgtggcaatgcctgccacaataatggaaaccaggtccagggtgccgtttccaaagggaatcttcacagttggcagaaagcctgcgccgatgtaagtataactggtgggaaggggtccctttgtctgggcctttaacagggtatatgtaagtccgcggcccataagcatggttgccagggttacgatgaacggcggaatgctgagcttggatacaaacagacccacgaacataccggccagggcgcccactgccagggcagccaggatggcgacccacatattggtgtggtagtcaatcatcaggatacctacggttgcgccgcacagggccacgatagagccgacgcccaggtcaatgtttcctgtcagacagcataacagcataccaactgccaggataaccacatatccgttctgcatgatcaggttgttgatgttggccggcgacatattctttccgccggtcatgactgcgaaaatcaagaacaccgcgattaaagcaagtaccatgccatactgcttcatatcaatattaactgttttcttcttatccatctctacgcttcctttccattatccgccataatacatttcatgattcgttcctgggttacctcttccttggtcagctctcctgcaatccgtccttcgttgatgacgtatacacggtcacaggtaccgattacctcctgcatctcagaggagatgacgattaccgccttgcctgacttggccagttcattgatgacgcagtaaatctcatacttggcgcctacgtcaatacccctggtaggctcatccagaatcagcacatccggctgtgtcagcatccacttggcaagaaccaccttctgctggttgccgcccgatagggagcccacggtctggttaatggaattagacttgatgttaattttcttcttgtaatcctccgcagccagaatctcatcattttcattgagaacaccgttcttggaaaagaaatttctcatggcggacagggtcatattccacttgatatccttaatcagcacaagtccataattcttcctgtcctcggacacgtatgccagtttgttgttgatggcgtccttaacgtcctttatatgtacttccctgccgtttatcttaatggtaccgcttattttctgtccgtaggacctgccgaatatgctcatggccagctcggtcctgcccgcgcccataagtcctgccaggcccacaacctcgcctttgcgcacatgaagggaaacgtccttgatgacctgcctctgggcgtcgtcggaatggtacacattccagtcctttatctcgaaaatcgtatcaccaatttcacagtgccgttccgggtaacggttggtcagctcgcggcccaccatgcctttgatgatgcggtcttccgtaaattcatctctgcccttctccagggtctcaatggtctttccatcacggataacggtaatggaatcagccacataactgatttcgttcaacttatgggagataattatgctggtgattccatgggatttaaggtccagcatgatgtccagaagccggcggctctcttcgtcgttgagtgcggctgtgggctcatccagaatcagcagctccaccttcttggccatggccttggcaatctctatcagctgctgttttcccacgcccaggctgctgatgggcgcgttcaggttttcgcctcccagtccaaccttttcaagcatttcctgggccttcttatgggtaagtgtccagtcaatgatacctttggctgctttctgctcatttcccagaaacacgttctcagccaccgacatgtacgggctcagggccagctcctggtggatgataacaatgcccttggcctcagactgcttgatgctgtggaactgacacacattgccgttatacacgatatccccgctgtatgaaccaaagggataaacgccggacagcacattcatcagggtggactttccagccccgttctcaccgcacagcgcatggatttctccgcgtttcaccttgatattgacatcgtccaaggctttcacgcccgagaattccttcgtgatgtggttcatctccaaaatataatcggacatcttttcaactccttttcttgaaagatactctgtaaaaagcgcaatcgggcggcggaacctatgccgccgcccgaatcatctttactgtgccagctgctcctctgtatagtagccgccgtctacgataatttccttatagttgtccttgtctactgctaccggtgtgcacaggtaagcaggaaccacaaccttgccgttattgtactgttcggtgtcgttgatttccggctctgcgccttccagaacagcctgtaccatggttacgcacttctcagccaggagacgtgtatctttgtaaatggttgctgtctggtaaccggagatgatgttcttaactgccatcagctcagcatcctgtcctgtaatcagcggccagtcctcgccaaccttgtagccggcgccttccagagcagccttacagccgtatgcgaaaccgtcaaatgcgcttgcgcagatgtctaacttctcgtcagcatagaagccggtcagatagttctcgcagttctgctgtgctgtttcctgggaccatctcaggatacatgtatcctcgaaggaggtacgtccggacttgcagaccagtgttccgtcatccaggtatggctgaagaacttccatcagtccgttgtacaggaacagtgcgttgttgtcatcaggtgagcccatgaagaactcgatggtataggactcgccggctgccttggctgcgtccaggtcctttgcttcctttatgtagttgccgattgcagtaccaactcccttgttgtcaaaggttgcatagtaggaaactgcgtcggtatccatcagaagacggtcataagcgatgatggggatgcctgcgttcttagcctgctcctctacgttcacaagtgcggaggagtcgatggatgcgattaccagacagttaacaccggatgcaatcatgttctcaatctgtgaaacctgcatctgcacatcatcttctgcatactgaaggtctacttcatatccaagtgcttccagctgcttcttcatgttggcaccgtcgttaatccagcgctcggatgactgtgtaggcatggcaacgcctaccttcttgccttccccggttgctgccttggctgcctcggtagctgcgtctgccgctgcgctggaatcagccgctgctgcggttgtgtctgctgccgctgccgctgtggtagctgctgcctcctgtgagccgccgcatcctgttaacagtgaagctgcgattgccgtccccagtatcatgcttaaaatttttcgtttcatatgttacctcccatggtttaatttatacatacaacttgtgtacatgttcacaagcttgtactttcgttaattcagccaacccttgcgtcataccatctgattcatttggactattttgcacttttgtagatttcactctgtctgcattgtgcgtttcgtcaatatttcttacgtttttctttaaatacactatacatttttgatgcttgtttgtcaataggtatttagaacttttttatattttttattgttgtacgtacaactttaacgtcattttacctattttcgtctaaaaacgacctgtctcatcctgtaaatagttctgaatcccgttccccggacgcaaaaaatgccagcaagccgacgacaggcttgctggcacaatgttctgttaaatttttaactcttttttgtttacttttgcctgacggccatgtttcggtgattccccttacttgttctttctcttcagtgctgcaatcagactctgaagcacgatgaagaagcacagaagggccgcaatggtaattctcacccaccaggaggaaagcgttccctggaaggtaataaaggactcgatggttcccttaatcaaaactccgaaaaggcttccgataacatttcccacgccgccggtcagaagggttccgccgataactgaggacgcgatggcatccatctcaaatcccttggcctgctccacgaaaccggagcatgtgttcatacagaacagaaggccgcccaatccagccaggaatccatccagcacataagcctggagcttgattcttctcacattcagacccagcagcagggcagactgctcatttccgccaatggcgtaaatggaacggccgaacttggtatacttaagcactacaaacacaatggccagaaccaccagggcgatgataacactggggtatacgtaaggataaatcatgactccctttttattcaggtaaccgccaaagggcaggtacatcttgaatgtggcaatgccggtaaatgtcttatttgtgatgctgatcatctcctggctgataatggaggtcatgcctcttgcaaagaacatgcccgccagggtcacgataaagggctgtatcttaaggtaggccaccaaaaagccctgtaccaggccgaatatacatcccgttgccagcacgataaggatggccggaaacgcaccgatatttcccctctccatcatccaagccagcatcatgcacaccatggccaccacagaaccaacggaaatgtcgataccgcctgtaatcatgacaatggtcatgccggttgccaccacaatcaggcccgcgttggatatgaacaggttgaggaagttctgtacctttgcaaatcctctgccgccaaacatgatgatacctgctatatacatcacaaagaataatatgatggtcacagccagcaggaaggagttgccgtccagtcttttcttttcacttctgtttttcattatgccactcctccttccacgttcttggatgaatgtctggatgccagacgtttcctgaatttcttaagttcctctgactgcacagccacaatcagtataaccacaatggccttatatacaggaatctggtccgcaggcacgctcatggcatagagggtggtggtcagggcctggatggtatatgcgccgattacggagcccagcagggagaaccggccgccgcccagggagttgccgcccagggccactgccgcgatggcatcaagctccatgttgaggccgatgttgttggcgtctgcggaatagatgcgggaggatgccaccagtcctgcgatacctgcgcacagtccgcagaacgcataggccatccagatgattttcacggatttaagacctaccagccgggatgccctctcattgatgcccacggactggatgtacattcccatggctgttttcttcagcagaatataggtgagcgccaccacgattacagccacaaaaattggggtgggaatgggaattcccggtatgttgttgcccagcagcttatatccgtccacgcggatgtatgtgatctgtccgtttgtcaccagctgggagatacccctgcccgcggtaaacagaatcagggtcgccaccatgggctgtatcttaagctttgcaaccagtaagccgttaaagccgccgcacaccacggccgctgccagggctgccagcacagccaggacgtagggattggcatactcattgaccgacacctcaccgcctgccaggaccctggtacacacagccgcagccactgccatgacagcgcccacggaaatatcggttccggcggaggcagataccaccagggtcatgcccacggccagcaccaccagctcgctggcacggttgattacgtcaatgatatatccgtagaggacgccgttattaatcgtaatcctaaaaaacgtgggcgtggtaatcagattgattaacagtactatgataagacaggataacggaagaaacagcctgtaacctgtcaactttttaagtttccccatcattcttcccctcctcctgcaattgccttcatgatggaatcctggctcagctcgtcttccttaagctctcccaccttcccgccgtcgcgcatgaccgccatacggctgcaggtgcggagcatctcctcgatttcagaggatataaacaccacggacatgccgtcctccgcaagcttcagcaccagcttctggatctctgtcttggtaccgatatcaattccccttgtaggctcatccagaatcagaaaatcaggattagtcaggagccagcgtcccagaattaccttctgctggttgccgccggagagctgtttgataggagtctccctgtcggctgtcttgatttgaagaatatcaatgtatttatccgtgaattcctcctgttccttcctgctcatgagcctgaacatgcctttcttggcctggagggcaatgatgatattttcgcgcacagacagatccgcgatgatcccctcctccttgcggttctcaggcagataggccatgccttccatcatggcgtcaatgggagcgttgacctttaacttcttccccttaacggccagctcgccgctgtccggcttatcggcgccgtatatggcgcggaccagctcggaacggccggatcccagaagccctgtaaggccgatgacctcgcctttatgtatatccaggctgaagggtttgatggttcccttgtggcccagccccctggcgcttatgattacatcttccttgaccgtggacacgccctccttcttgatggctgccagatcgtcgaaatccttacccatcatcttggccaccagctgtaccctcggcagctcctccaccttgaattctcccaccagggttccgtttctaagaaccgtaatcctgtcgcacacagcatatacctgttccaggaaatgggtgacaaagatgattccgattcccttgtccttaagctgtctcatcagcacaaacagcttctccacctcaccgtcgtccagggaggatgtgggttcatccagaatcagcaccttggccgacatatccaccgccctggcaatggcaatcatctgctggatggcaatggaatagttctccacagccatggtcacatcaatgtggacgtccagtccctccaacagcttcctggcatcctccttcatggtcctccagtcaatcatgggaccttttttcggttctctgccaatataaaggttctctgccactgacagattgggacacaggttcacctcctggtaaactgtgctgatgccattttcctgtgcttcctggggcgaccggttgatgatggtattggatgaaccttccattcggattgtaccggtctcaaactcctccacgccggtcagcaccttgatcagtgtagacttcccggcaccattctcgcccataagggcatggatttcgccttttctcaaagtaaaatccacatcctgcagcgcctttacaccggggaaattcttgttgattccccgcatttccaaaacaacgttctgctccatgcgatttccgcctttctaccgttatacgccccatttccagggctcagttactagaacacatccagcctcaggcttgaaaagggggagagccgtgcaacgactctccccaccgcctttcctgaactgttacgaaaatgttgattaataagcacgctcagccttgatagactctaaatccatggatgtatcgaagtaagcttcgtctacatactgaatcttctcaacggtctcgcccttctccagcttcttgatgatctcatctacacgcggtccgtgtaatgggttgcactcaaatgctgcgtttaagtcgccggctatcatggcgtcaaatgctgccttaactgcgtcgaaggagaagatgatgatgtcgccgtcaggtccgcaggtcttgccggctgccttgattgcgtcgatagcgccgaatgccatgttgtcgttctcagctactaccacatcaatatcgtcataggacttaaggaaggattccataacttcctggcccttagcctgtgtgaattcacctgtctgcatatctaacattttccagttgtcatgctgctttaagatgtttccgaaaccttctgtacggccaacctgagcggatgctccgatggttccctgaagagtaacgatgttgatgtcctcgccgtctcttccctgtgcctttaagtaatcagccagccagtttcctgctgtctcgccttccttgatgaagttgccgcctacccagcactcatacaggctttcatccacgtccatctgacggtcggacaggataaccggaatgcctgcttcctgtgcttcctggagaactgcttcccaacctgtctcaacaacgggagccactacgatgtagtcaacatcctgctggataaagcttctgatggccttaatctggttctcctgtttctgctgtgcgtcgtcaaaaatcagcttgtagccgttttcctctgtaaaggtggacttgaaggactctgtattagctgttctccagtcagactcagcgccaacctgggcgtagccaaccacaatcaaatcaccggatgcagcgtcatcctttgcctctgcctctgtctcagcctctgacttctcaggagccgccgtggtgtcggctgctgctgccgttgtctcagctgctgcgggagctgctgttgtctctgcaggcttatttccgccgccgcaccctgccagcagggatgctgccattgctgcacataacataacgcttaatccttttttcctcataatacgtaaacctccttgatttgtattttgtttccccttgttggtataatcatatcagttgttaataacaaaaacaacggaatttctccgttgttttgtacacgatttttagaattttcacagtttgttcatacatttgggtgtttttttacgattatggttggatatttttcaatcctccccttccctgtcatatccggactccagcggaatattcaccacagctcttgtgcccagccccagaacgctcttaaactccaggctgcaccgggaaccatagttcaggcgcaggcgctccgccacattgaaaagcccgaaaccgcccttgggagcaggtccctcctggaaagccaaatctttttcccctctcagcttccgcctgacggcctccatctcctcttccgtcatgccggctccgtcgtcctccacctccagcacagccatgtcctcctttgcgtatccccggacccagatgcgtcccctgccccttttattcttgattccgtggtaaagagcgttctccaccaggggctggagggtaagcttcaggattcttcgttcctccagggatttttcaagggtgacctcataatccatgatatcctggtaccggatcttctggatctggagatagcttttgatatggccgatttcctcccgcatggtgataaaatcctttccgccgctgagggttgtgcggaaaaattcggacagggaggtaaccatgtccaccacagcccggttctgtcccccctctgccagccacacaatggtatccagggtgttgtagaggaaatggggattaatctgctcctggagcagctgcagctccatgacgcggcgctggttctgttcctgccgtatatcctcaatcagccgtccgatttcctccttcatgtgatcaaagcttcccgtaagaattgccagctcatcccctgcctcaatcttggggccggaggtaaagtccccctttgcaaccctctccgtctcattgcagagcttctgtatgggcacggtgacgctcttggttatcctgcggctgagcagaaggctgataatcaggatggacaccagcagcgtcaggctgaccacaatggctgtgtgctcctggctctccagctccttctgtatctcctggacatggagcgtctcatagtatacatactccctgccctgcttttcaatatcagcggtcagtacacggacgccgtaatccagtatttccatgtttttatcatacatgccgtggggcaggttgtcctctatctcgtccaccctctgctccagctggtccaggcagtggagcagccagttaatcctggtccggttggccccctccggcgtccgctttaacagctggcggtatgtctttctggcatcgcttatggtctgatgcgggtccttaatctgttcccatccgtagggccggtcctcctccatcagctcatggatggactggtaggtccgcattcctatgacaatgcggtacatgctgtagtccacatcctcccgcaggttggccgtgacactgttggcctgggtgatattggcgatactctgggtgtaggcattgcagaacttggccaccgtggccataagatagataaccagcaccgccaggggaatgatgatgataaaagtcatcaggttcagacgcttttccaggggcaggcgatccaggatatggttcgtgtcccaatccttcccaatgccctgttccttctcatttgctccgtcctgcccttttttgccggacccggtcctccattttcccgtcatgacccctccctgcttcccgccctgtactccttaggtgtacatccaacggttttcttaaacagatagccgaagtaatgggaatccttatatcccacctcgtacccgatttcagaggtcttaagattagagcacatcagcagctcctttgccttttccatgcgcactcctgtcagaaactccacaaaagtcactcccatctcctggctgaagatggagctgaaatagctgggactgatattgaccctggcagccaccgtgttcagggaaatctcctccttggcgtaattatcatagataaacgccttggcctcatccagaacctgactgtacttgctggctgtctggctgtccctcagggtcatgacctcctcaaaaagcctcaccagcttctccttcagcatgtccagggcacaaccgtccttaagtaccttttccatatccgacaattcccgcgggagacgtcccatgtccagtcccagctgttccagaaatgtgctgacacagagatagcagtccatgacaatgtactggcggaacataaaagactggcagttcttttcccccacattctggaaatactcctccacaaacccggaggcctctcccacggtcccctgtttcagaaaattttccagggtctttctgttcaccttggacgcatccactgaattaatatcaatggtttcccctgttccgtggaccatgccgtccatctggctgtagcttataatccggttcatctccgtgaaaaatctggcggcaaacgccctccccgcctgcagataggaggtctgcaaatcgcccagacggttcacgcagcttccgattccgccgaaatactgtatatccttacaggctccggccatctttcccaggctggcggcacactcgctcattctgcgttccacctcctgctcagactcccccgtgagaacgaaggcccacccctcgtccccgcggtcaaaaaccaggatgtgctgccggccctccatccgttcctcaatcgcctcctggcaggataccacccggtcggaataggcaacggcagatcccataggcatgagcttaaacagcatgagctggtaaaaggaggcggacaaatccatccccacctgttctcccctctccagggcttccttaaaattgacccggcccgtcaccaggtcccgcagaaggcgctggcgttccagcaccgtgttctcagccatctccaggcggtacttatccataagcctggcgtcctcccgctccttctcaatcacatccgccaccttcttcactgcctccagaagcttggcagccgtgatgggcttcagaaggtagtccgtcactccgatgtgaatggcctgcttggcatagtcaaattcattatacccgctgagaataatgattttgattctgggaaattccttcttcaccagttcagagagttccagtccgtccatgaagggcatgcggatatctgttatgaggatgtccggctgcaccttcctgataagcggatatgccagttctccgtcgctggcttcccctgcgaattccagcccttccttctcccatgggatgttgttcttgatgccatttcgcatgacaatctcatcctccacaagaaatacctttatcataatccagttcccccctcttatgtatttttttccataccatccatttgctgtcttacagtataaaatataacacattcattttcaagattcttcctaaaaaagaaaaagcagagacctgtgcgctgtctccgcctttgtttcattttaccggcttactgtttttcccggttcttccggttaatccattccgttgacacatccatggccgcccggcaggcccttgtctggtccagggaattcagcataacaaaatcatggattatggcctggaaccgcagggccgtcacatccacccctgcttcgcgcagcttcccggcataggcctccccctcatccctgagcacatccgcctcgccgttcagtatcatggcatccggcagacccctcagctgctccacggatgccctgaggggagagaccgtaatctgcgccctgtctttctggcagggggcatactggttccagaaccactgcatgcctgcccggtacaggtagtatcccgctgcgaattcattgtaggaacaggtatcaaaacaggcattggtgaccggataatacagcagctgtttctggatgaagggccccttcctgtactttgacataagggtcatggccgcagccatattgcctcctacgctgtcccccgccacggtgaaggttccgggattcatggcatatcccatggacttcacaaggtcgggagccgtacacatgacgctgtagcactgctcaatggcggtggggcagcgcacctcaggcgaacgggagtactcagggaatatcaaaaggcagccagtcctggcagccagctccctcaccagcttttcatgggtgtggaagcttccgaacacccagcctgcgccgtggatataaaagatcacattggccggctggcaggaaacccccggatccaccagccataccggaatggtcccccatcttcctgtattgacccgcaccttgccgacccgggcgggatatttgtacacaggcgtatcctgggccttttccagaaccatccttccctcggcaggcggcagctcaaatataaggggcggtttggaatttgcctgacagacctcctctgccgccggctctaacggtacacaacgtttcatatggtactccttcttgacaaaagtctctactgtcagaatattccagattccacgttctgctcacctgttttattgatttgcactattttcttccgccttcttatagcatgtgatatcatggcagcacagcaggcaggcatccttgcccccccagtgaatccgggaggcatcggccgatgaccagaccttaaggactggattatagacctccatggtgtagtttatcttatcctccacctgcttcatgggacaccgctggcagggcttatcatttttaaaaaacgcttcatgacagctcatgcccagccttgaatccggcgcaagcctgtaggtcttatcgttaataaacagcagttcatgactttccatgtccaccacataaatccatgagttctggtggtccagaatggtccttaagtcctctgccaaatccacggcgctgtcctgtgccctctgcttaaggaggaacagggacagcagctcggacacaaaggagagaacctcgatctggcttatggtccacaggcagtgggaggtacagtcatcaaatcccacccatcccttgaacacgccgttatccctgatggcgcactggagcatggacttgacgcccctttgcttcagccgtctttggatgtcgccgggaagctggcctatatcatcgcagtagagaatcccgctctcattaaagcagctctggtaatctgtactgaactccgcataggaacatccctgcagcaaatccttctgggaccggattccccgggcgcaccactcaaaggtgttgctgtagcaggtcccatcctccgaattctcaaatacataggcgcggctcacctgcagacgctcccccaaaagctccagcacactttcaacggccttgtccatctgctctgacttggacaggatgttaaaggctcttggaagcaggtcatttaacatcatgtccccattctgttccgactcaatggtggtattcacagttgcctttcgccccgctccctggccgaacgccttgtcctccatggactggtcgtagatctggtactgcttttttccgcaggccttggcctggtacagcgccacgtcagcccgccggaacaaagtctggaagttctccccatcccttgggcatacggcaattccgatgctgcatgtaatacagcagtccttgggcagctcctccagcacacgctcaaagcactcgatgagccggccggccacagactttacccgctgttcattgaccactccctgcaaaagggccatgaactcgtcccctccaattctggagacaatatcgctgctgcgaaacagccgggaaagctgccctgcaatctttgtgagcaccgcatccccaaacatatgcccgtactggtcattgaccatcttaaaattgtcaatatcaatgacgaacagcgcagccccttccccttcctcccggttcaccagcaggtgttcgattctctgcctggctgattccttgttgtacagcctggtcagggtatcacgctccgcccgtgcctttaactcctgggcggcaagcttttcatcatttatgtcaataacgattcccactgccttgcagggctgtccctggtcgtcaaactgggtggtggccctcagcttgcaccactgatagcggcccttggaatcagacaccctgaactccagctcaccataccgccttccgtcccgtatctcttcgataagatgtccgaacggcgccatatcctccggatacagatgggatatcttaggtatccgtactgatgcctgctctgagatggggtcatatccgaacttggccttccagttgatggagtataccactgtgtcagaaccgatgtcccattcaaagaaaatatcattggtctgttccataacgattttataccgttccagtcccaggcgcagctcctcctgggcatgtttggtctggtcaatgtctatgattacgctgtaaaaatattccctgccctcgttatcatacatcagacgccccttgtccagcatccagatgctgcggccgctgcggtcctccacccggtattccacttcatattccccgccccggttgatctgttctgtcagctccctgcgcatccgctccctgtcatccgggcgtatcatttctatataacagttgttgaaccgctcttttatctcctccctggtatatccaaggaacccgtcgtcaacatccatcatggtgaaccacctgtcattgcggcagcgcaggattcccttcaatatgttgtgaagaacccggcggtcctcacggagcctgttttcgtccaaatccgcctccggatgcgctctgtccacgagccgccacagcagcaatgcctttcggcggcggggatgttcgatgtccacccgcagaagggtcagctcataccactcctcagatctgtgctcatccttcagccggtacttccagctctgtttcagcattccctcttcaaagaaacgcggtatctctgttttccagatccgccgcacattgtcctgttcctccggcaccaccaaatcatttatgcagcattccgccacggcttccaggcattctccctgaaacagcttcttaatccgctcgtccggcgcgtataccacatgatagctgcccgtggaaaagtccacctcagccaccgtggtatccacataccgcagcatggcaaaatacttcatctgttccagctgcagggcgctcaggctgccgtcccccacccccaggacactgccgtggcgggaaagctttgcaggcgcagggacattgccgtcccggtaccgtttgcacaggtcagccagctgcggctccacattcttaaagcagtccagcagtctggaggaaaagcatccgcattcaccgttcagaatcatgttgaaggcctgttcatggggaatcgccttcttataaacacggtccgacgtgagggcatcgtatgcatccacaatggacacggcctgggcgcagatagggatggcatctccgtacagcccatccggatatcccctgccgtcccagcgctcatgatggtaccggcagatgttgtaggcgtattcaagataccccttatcgctcatgcgttccaggccctccagaatctggcatcccctgagtgtatgggtcttcatgatttcaaactcttccgcagtgaggcggcccggtttattaagtatcttatcctcaatggcaatcttgccgatatcgtgaagggccgaggccgaggcaatgacttcaatctttttcttatccagcccgtattcaggacaattcctgcacacctcctccaaaagcacctgggtcagcagacggatgcgcttgatatgctgccccgactccagactcctgtattcaatgacagatgaaagggcgtccaccagcacatcgttggactccctcagcttctgcgcctgctgctctaccatgtcctccagattatgtttatgaagataaagctctatgatattatgtacccgccgcttgaccacatggggttcaaagggcttgactatgatatcggacgcccccaggtcaaaggccctcagctccccttccagggagttatcagccgtgattaccaccacaggaacctcgtccagaagcccgttggcacccatctcctgcagcaccttgtatccatccatcacgggcatcaccacatccagcagcatgatggctatattctcgtgatactgccgcagcagaagcagggcctgctccccattctcagcctccagcagatggtattcctcctggaacagtccatccagaatcacgcggtttatttccatatcgtctacaatcagtatggtatcccgctgacgcatatcgtcacttcctctccgcaaccgtaagacacaagctgccgctagtcatttgcaagtattctgcatatctccttgtaagcctcttccagctccggatatgcttcggcagcttcatcaaaacggtctgccctgatatggtccaccataaaagaggatatgttaaacagcttatccatacccagattggccgtaacacccttaaaggtatgggttgccatcagggcatcctcccggttctctccctcaaaggcctttgtgatctgggaaaaagtactgtctgtcagaaacttcttcagaaacttctcgtacagtgcggaattgccgctgaaacgccgtaaggcgccatctatatccacccctgcgccctttaattcaagtattgtatttaaatccatgaaaatccccctcattccggttctggtcacagaaaccgttctcaaatgaaaatgacgaaaaaaatataacatattgtataaattatagcaggttgaggatatttgtgcaacgatatgaggaaattacagaacaagcgcggaacaagcggaagtctatgagaaacaaaaaaggaaccctgcttggaaggattccttttttctaaaatgcgggagatgggacttgaacccacacgagcatacacccacaagatccttagtcttgcctgtctgccaattccagcactcccgcaacacgaatggtagtatagcatagatttttcgacttggcaaccatttttgacaaatttttttaatttttttcaaaaatcaaattcgataaaaaatttaaaaaataatattgacaaatcgctgctgctcatttataataactttcgttgcttgaacaaagcagcagaacaaaacaaaatgcagaagtggcggaattggcagacgcgcacggttcaggtccgtgtggtagtaataccttgtgggttcgactcccatcttctgcaggcagaaaacaggaatttccagtatggagattcctgtttttatgttcattttttctgcagcagaccggcccggcaccagacagtccggcaccgccggcacatccggtccttctccggcccagcagccggccgcctattccccatcctgttcaggaacatacggacatgtggttctgcgcacaatcaatgtggggtcaagtatcacccgttccggcttttcctgtgggtttttcagctgttttaacatcagtctggcggcatgctcgctcatctccctgacatgctggctcaccgttgtcaagctgatgtcatagagtgatgaaaaaacaatattgtcgaaactcaccacggaaatctgttccggaatcttgactccggactcccggcagtgctcaacaaacccaatggccatcatatcgttggaaatcacgattccctttggacggttcttcaaatccgatatataaatctttgccagttcacttcccgtgtccagcttcaaatcacccttaaatacattttgttccttaaaggggagacggtaattttccagcgcctgcctgtatcccctgaaccgctgctccgatgcggacgaaacatccggcccctttacaaaggcaatctccggataccccagctcaatgagatgcatggccgcaatataaccggccttgaaattgtccgacagcaccgaatccccttcataggaccccaggatcctgtttaccagcacaaccggaatctcaatatcatctaattccttttcaatttcctctgattgggcagtaagcaaaaatacacctgaaaaattaaattggatagccatatgaatgaactctttttcccgcctgatatcgtattcactgttcaggaccatcagcatatatccattgttgtgaagaatcttctggatgtaaaaggtaagatccgcataaaacggattgcggatgtcgctgacaatcagcgcaatgatgctttgtctgcccttgctcagacttctggctattgtatttggctgataacctatctcctccacaaaatccagcacctttttgcgcagctcctccccgactcccggcgagttattcatggctctggaaatagtggaacgcgatacccccagcatctgggccacgtcggaaatggtatacttatcttttttctggatactcattctcttacttccttatctgctttgaaataacatggctgtgatccacctatcccaataagcgtcttgctattattataatataagtaaaaatgtaatgcaatcggtattgcgagaaacgaaaaaggaggagcagcccccagctgttcccccctttcgcccgtcatccttaattgaacggcgccggataaatggtatcgtgttttgcaatgtcaaacggccatacggtaacaagcgagccatcctggaactgagcgattgtcagcttgccgtccatattggtgttcttataaggaataccgttaaattcagactcggagaacttgatagtgtcataaggaagaataatctcctcgcctcccgggaaagcatctttaatctccagagtactcagctcatcctttaatgcttcagaggtaatctccttgcctgcgtctgcaagattctgaagagctgtcctgaaaatccagactaccgtgtacgcctccgcggaatgcccgttcatatcaacgccgtactttgccttaaacgcgtccgaaaccttggttcccttgtcccccggcagaaactccgtggctgtaaggattccgtttgcaaggccgcccacagacggaagataagaggattccgtataaccgtttgccttggcaatcatgatattgggcttgtacccctgctcgttcatggtctttgtaaggagaatcgcgtccgatacataattgtcaacaataagggcgtccggattcagggactttaactgcagcacctcgctggtcaaatccgccgcgccctgggagtaaagaacctctcccttaaattccagtccgttctcttctgcaaagtattttgcccaggtggctgtctgctgtcctaattcagtattgtccgcgcagaccgcaacactcttgacgtcgatatcatccgccggatccttggccgacaaatccagaagatactgctccatatcacgtataaacatcatattggtgggagccaggcggaagaaatactcatatccgtgagatgtaagggaatccgacgtggcattggctgttatcatgggcacctggtagttttccgccacctgggacaccacttcggtaacaccgctctgatatgcgcccattaccgccatcaccttatcctgtgtaatcaaacgttccatctcagtcatgcccgtggcattggccccctgggtatcaccgtatacaatctggataggccggccgcttattccccctgccgcgttgatttcctccactgccaggtcaatgccgtccttcatgttctggcccgaatcagccagcgctcccgtcatgggataaagcgcgccaatcagtatgggctccccatctgccgtggacgcctttgccggctccgccgtcccgtcactgcctgcagccgcggtcgtggccgccgcccccgctgccgttcctgctgcctctgccgcatccttctgtcctcctgaaccagaaccatatcccccgcatccggacagcatacccgctgccatagccgcgcttaatgtcaatgccaccaattgtttcctcatgtatttctcctccttttatttgattaacccatatacgggccatctttcatttttagtttgtttccgcagcagcaggaacacagctgccaaccgcgctctaaaatcccagatacgcctttttcacctcatcgttgttcaaaagctcttcggctgtgcccgatacggtaatctggccgttttcaatcacgtatcccctgttggcaatcctcagcgcctttctcacatcctgttccaccaggataatggtaagcccggattcctgcgccacctctttggcaatggaaaatatgttgtccacgatgttgggggccagtcccagggagggttcatccatgataagaagcttcggaagtcccatcatgcctctggaaaaggcaagcatctgctgttcgcctccgcttaaggtgcctgccagctggttctttctgtccttcagcttaggaaaccagttatagatccgttcaatggtatccttcttagccgctttcgccgccttgctgctggctcccatctccagattctcatagattgtcatggaaggaaacagctgcctgccctccggaaccaggataaccccgtggtcaataaaggttctgcaagccgctccggtaagatcatgtccgtccaaacggatatttccctgaaagggcctgatcaggccggcgcaggacttaaccgtggtgctcttgcccgccccgttgcttcccaccagggctacgatttcccctttatccgccgtaaattcaatattccaaagcacctgaatgtccccgtaccggacattgattttatttacctcaaaatacctgtctgccatatcaatgctcctccttaccaagataaatctcgatgacataggggtcattcattaccatctccggcgttccctctgttattttctcaccatgatgcatgacaaccactttctggcagagattggccactgctctcattacatgctcaatcagcagtatggtggtcccgttctcattgattttgcgaatcagttccacggcctcatctgtctccgtgggatttaagccagccataacctcatccaatagcagcatatcaggatccgtggccagggccctggccagctccaggcgcttcttaaagggagtgcccatttctcccggcagccagtccttccgctcgtacaatccggtaaaatgcagaatttcctctgcgtattcctttgcctcttttactgatttatatttttttcttccatatagagcacctgaagcaacattatccaatacagacatggaagccagaggcttcatgatctggaatgtcctggcaattcccatggacgtgtagtgatatggcttcattccggtaatttctttatttttatagataatatggccggccgtaggcgggaacacgccgcttatcatattgaataccgttgtctttccggctccgttggaaccgataagcccggtaatgccgccctcctccacagcaaagctgacactgtccacagccttcagtcctttgaaattcttactcaaatcctttatttccaatatattgcccacttaaaacgcctcctctcctgatttactttttaccgtccatcctgtcaaacatatcattgacctttaccttgaatttgctgccgttataccagcccataatacctcttggctggaacaggataaccacaatcagaatgatggcgtaaaccagcagattggctccgggcgctatgctgctcagggtagagttgagatactgagctaacggtgtaagaataatagctccaatcagggggcctgtcacgcttccgattcctccgattactgccggaagaacgaattccacggactgtgcctgaatcatgatatccgggttaatgaaacggatataatttgcatagaacacaccgcatacagcaatcaggccgcagctgacaaaggtggccagcaccttatatttgagaggattgattccgattgcattggccgtatcctcatcctccctcactgtctttaaggcatatccaaacttggaacggtcaattgcgcgcacaatcagatataccgctattaccataagaagggacagataaaaatagggcactttactcttaaatcgcagcagagccagggaattatcgccaaagggaagcaaaagcccctgccccttgccggcaaaatcccagttggtcatcagattgcggaacgcctctccaaacgcaatggtaaccagtgaaaaatacggccccctcagcacgaaacagggcgacagcagcaatgcggttaacgctcccacaaacagaaacaccagaggaatgctgatccacggcgatacattcagcttaaccagcaaaagagtggacatatatgcgcccagccccataaaggaggcatgtcccagggaaatctggcctgtcagcccgcccaggatactccaggccagggacgcgctggccatgtaaaatgtcatcacgcaaatcgacagcaggtacggtgtacggacaaatacgggtatcacagctgcgattagaagtaaaatcaataataaaatctgtctggaacctatttttttcttcattgctatctacccccgtcttgttttcactgtctgtttcactaccagaatcaatataaatgccaggaacacaatggtatccttaaaggaggaacccacaaccacggctcccacggtttccataagtcccaatacaatgccgctgacaaaggctccgataacacttcccagtcctcccatggttaccacaatgaaggacctcgtcccatacacggcgccaaccgtagggaatacataataaaaggacatcagacaggctccggtgattccggcaatggcagctcccagaccgtatgtagtggcatagaccagctttgttttgataccgcagacctgggctccggtactgttctgggaagtggcgcgaatctgctttcctatattggtatactttaagaaagcaaacaaaaggatggttaccgccagaagaatcacaaagctcagcaccttgggaaggcttaagtttatggctcccagctgcacgattttctcggaaaacatactctgggccgttctgtaatccgatttaaaataaagaagcgctacattctggaacagaattcccagtccaaccgttaaaaacagcacattggtatcgtcattgccgtgcagggaccgcgtaatcagcgttgactgcaaaagcgccccaaaggcgaacatcaccaccgccacaatggggattgccacaaaggggtcaagaccgcattggtcaaacagaacaaaggatatgtacatacccagcatcagcagctcgccctggcaaaaattgataatcttcataactccgaaaatcagcgtcaggctcatacctatcagtgcataaattccgcccaccataatcccattggcagccgcctgcaaaaatatattcatgttactacctcccaactaatttgataacagctccgtgttcacgaacacgtttccacccgtttctaccttcccaaaaaacctccgtctaccggtataactgccccggatatataagcagaggcatcggaagccaaaaacactgccagccccttaagatcctccgcagtcccccatcttcccatgggtatcctgcgggtggtttcctcgtattgggcaggattctttaccttcatggtatctgtcagcgccgtggccatgtatccgggggcaatggcattgacattgattccttctgccgcccactcatttgataatgcttttgtcagctgggcaaccccgcctttgctggcactgtaggccggaaccagaacactgccaaaaaaggaatccatggatgctatgttgataatctttccgtaacggcgggccgccatagaccttccaattctctgagacatgaagaacacagcgttcagattaagctccaccacttcattccaatcctcctgcgtcacctcaaaagcggcacatctgtttaatgttccggccgcattaaccaggatatcaacacgtccattgtaaatctccaaaatctgctcacagaccgtttcccgctgctgctgcctgcttaaatctcctgtcactccataagccggaggtccgctgcttcctatttctgcggcagcttcccacaccttcccggtcctgccggttatgattacctctgcacctgaatcgtgcagcgcctgggcaattccatatcccagtccacggctgcctcctgtgacaaccgcccggcgtccttctaaatcaagtatcattatcttccatcttccccctttctttccctgtatctcaacgaatcaatcccctccttttgcatcatacagtttgtgtccgccaatcgtaattagcgaatcagtttcgtaatgtttcgttctttttagaaaacagtttcgttacgttgttccaagcatagcacacggtttcgttaaaatcaataagtttattctggttttcctcttgttttaatgcttttttacttttttgacaaattttcagtatatatattgtctattttttaaaaattgtttattttttatcaatataattgtgcatatggtcagattttacccgttttaaatctggctcgcctcttcaccaaatgtacaatatgcataatattttttacatatttttatatcacattgtctctattataatagaatgccaaaaataaacatatttttgttattgactattgaatcattttcgtttactattagccttaaagaacgaaatcggtttctctaatacacgggggtattaattatgattaacggaacaactctttggaatcgctcttatactgcagatatgatagaaaagaccttttccggtaagacttatttgacctatcccaatcttcctgccaatttatacgacgccttatccttatctgccgcacgccatccggacaagacagcagttgtggatgacagcggcgccacttatacctatacagaactaagggacatggccgaccatttttcttcttacctatattacatatcggatatcaagccgggaaccaagacaggcatcatgatgttcaacagcgttgaattctgcgtgaccttcctggctcttacaaaactgggagccgtggtaataccgctccccagcaaatacagccggaacgaagtgctttcactgacagcaaaggccgatctccagtacatcctgtgtgatgaaaagttttatgactggttcgtaccgttggaaacctccggcgtccatctgatgaagcccggacggagtcaggacggatttggtttttcccacctgtgcgcctcctatctcagccccgttccctcccttggcagggaggaggatgacgcgctcatcatgttcacatccggcaccacctcccagagcaagggagtcattatcaagaattacagcatcatgcacgccattgtctcctaccagagaattttccagataacggaccgggacaccacccttattcccattcccatatacctggtaaccgggctggtggcgcttctgggactgaccctgtatgcaggcggaaccgtttacctgcacaagttctttgatgccaaacgggttctcagggatgtaaacgacaaggaaatcacatttctccacgccgcaccggccgttttttccctgctgctgagggagaaggacagttttccttccctgcccagtctgaggcttctggcctgcggaagcagcaacatgtcaaaggaaaagctgacagaaatccaccgctggctgccctgcgccgtatttcacactgtatacgggctgaccgagacatgttcgcctgccaccatctttccgggcgatgcttccaccagcagttacattggttcctcaggccttcccattcccggcacctgcttttgtatactggatgactcaggttcacagatgcagacaggccaggtaggggaaatcgcagtcagggggacggttctcctggaccggtattatcaaaagggaaccggggagctggacggagacggctggctccgtaccggagatctgggatattttaacggggaggggtatctgtttatcgtggaccggaaaaaggacatgataaaccggggcggagaaaaaatatggagctttgatgttgaaaatgagctgtacaggctggacgggattgatgaggcggctgtggtggggattccccacgatatatacggcgaagtgcctgtggccgcggtgaagctgtctcctgaaagcattctgacggaacagcagatacaggatttgctgaaatgcaggattgccaaatacatgattccttcccgcatccttttcctgaacgagctccctctcacgcccaataacaaagtaaataaatcagccatacggaaacttttcatgcagccagaacagtaaggaggttacacaaaaatgagaaaaccagtttttatcaccggcgaggaagccgctgccatgattgccgacaacgcaaccgtggcaaccatcggcatgaccctggtgtcggcagccgaaaccattctcaaagccattgaacagcgctttttagagacaggaagtcccagagggctgactctggtccattcctgcgggcagagcgaccgagaccgaggtatccagcattttgcccatgagaccatgctctccagaatcatcgggggccactggggactgcagcccagaatgatgcagctgattgcggacaacaagattctggcctactgcattccccagggccagtttgcccagttataccgcagcatggccggaggcgagcccggaaaaatcaccaaggtgggcctgggcaccttcatcgaccccaggattgacggaggcaaaatgaacgaaatcaccatgagcgctcccgatatcaatgaggtggttaccatcggcggcgaggaatatatgcgctataaacccatccctctggattactgcatcatccggggaacctatgtggatgaatacggcaatctgaccacagacgaggaggccatgcagctggaagtgttctccgccgtcatggcatgcaaaaaattcggcggaaaggtgctggcccaggcaaagtataaagtcagggccggttccctccactgcaaacgcgtgattgtgccaggggtattcattgatgcggttgtcatctgtcccaatcccgaagaggaccacaggcagacccacagtttctatatggaccctgcctactgcggagataccaaggcgcctgtatcatccgacgacgtcctccccatctcgctgcgcaaggttatcgggcgcagggcattgatggagctggcgcccgatgatgtgctgaatgtgggaaccgggattcccaatgatgtcgtcggccccattatcacagaggaggggatgtcggaggatgtgaccataaccgtggaatccggtatctacggtggcattcccatgggcggtatcgactttggaattgccaggaaccagtttgccctggtacggcacgacgaccagtttgactattataacggacccggtgtggatgtcacctacatgggtgcaggcgaggtggacgccgagggaaatgtcaatgccacccgtttagggccaaagcccacgggagcaggcggttttattgatattaccaccaatgccaagcacgtggtcttctgctcctcttttaccgccaaagggctggactgctcctttgaaggaggaagacttcatatcaaccaggagggctctttaattaaatttgtcagccggattaagcaggtttcctataacggcagaatcgccagagaaaagggccagaaaatgcactatgtaacggaacgggccgtatttgagcttcgtccggagggactgaccctgaccgaaatcgcccccggaattgatatccagacccaggtcctggacctgatggaattcactcccctgatcagccctgatctgaaggagatggatacagccattttcatggagggtgctcccttcggacttagaaagtatatattttctaattaatacgcagcagttcgggacggtcaggatgagactccgtcctgaacagttccaataacatattcacattaaggaggattaatcatgagactcgaaaacaaaaccgcaattgtaacaggtgccggccgcggcctcggcaaagggattgccttaaaactggcagcagaaggcgccaaggtcatcgtagccgacatgtcaatggaaacagcctctgcaactgctgaggaaatcaacgcttccggcggcacagccaaggcctttgccgtcaatatcgccaagcaggacgaggtaaaggcaatgatggactttaccgtggagtctttcggcacattggatgttattgtcaacaacgccggaatcaaccgcgacgccatgctgcacaagatgactgtggagcagtgggatcaggtcattgcggttaacctgaccggcacattctactgcgtccagtatgctgcccagattatgagggaaaagggaagcggcgccatcatcaacatctcctccgccagctggctggggaatatcggacaggccaattatgccgcctccaaagccggcgtggtgggcctcaccaagacagcatgccgcgagctggcaagaaagggcgtcacctgcaatgccatctgccccggttttatcgacacggacatgacccgcggcgtacctgaaaaggtatgggataccatgataagcaagatacctatgggaagggccggcagccctgcggacgtagccaatatggttgctttcctggcttctgacgaggcaaactacattacaggcgaagtaatcaacgtgggcggcggtatgattctttaatgatataaaatgaggaggatacggatatggagaatttaaaagaagtagtaattgtcagcggagtccggcttcccgtcggctctttcggcggaagcctcaaggatatttccgccattgatatgggcgccatggttgtaaaagaggccgtgaagcgtgccggtatagagccctctgatgtagatgagactattgtgggccaggtgggccagattgcggaatgcggttttgtagccagagccgtcagcctgaaagccggacttcccgaaacaacatgcgcctattccgtcaaccgccagtgcggctcaggccttcaggccattgccgacgcagtgatggagatacagacagggtttgcagacgtggtggttgctgcgggcaccgagaacatttcccagcttccctactatgtgaaggacgcccgctggggtgccaggatggggcacaaggtgtttgaggacggcgtcattgatatattgacctggcccttaggcccctaccacaatggcgtgacagctgaaaatgtagcagaaaaatacaatgtgacccgccaggagcaggaccagtatgccctggaaagccacctgagggcagcggcagccatcgaagccggtaagttcaaagacgaaatcctcccggtggaattaaaggacagaaaaggaaacatcactgtctttgacactgacgaaggccccagagccagccagaccatagaaaagctggagcgcttaaaaccatgttttgtgaaggacggaaccgtgactgcgggcaattcctccagtctgaacgacggtgctgccgctgtggttgtcatgtccagggaaaaggcagacgccctgggcgtcaagcctctccttaccattaagggctgcacggttgccggcaacgacggagccgtcatgggatacgctcccaagctctccagtgaaaagctggcagcgaaactgggattggaccttaaggccattgatatgtttgaaatcaacgaggcttttgcaagccaggcctttgccgtacggcgcgacctgggactggaccccgaaaaagtaaatatttacggcggaggaatctccatcggccatcccatcggagcaaccggtgttatcctggccgtgaaggtactttatgaactgcagcggaccgataaaaaggacgccatggtaagcatgtgcattggcggcgggcagggaatctccatgtactttacaaaagactgatactagaaattaaaaccggagctgaaatctgtgttagaggatttcagctccggtttgttttgaaccgcagtaaaaatgttactatattcaatgttactatatctaatgatcaaatcacctgaacatctgcagataataccagggaggaaacagcctccccacctggtccagtcccggaaagaacctccctgcatccacaaaaacaggacagaacacaaggcttccgataaccaggaagggtatgatgcagcagagaacctggggcctgcggcacaccaggcgcagaatccaggccgatgctatgacaacacagcagtaaccggccatggccgcagcctctcttggaaaggatgtcatcacgccgcccgcccacaaggccagaagccctgatatgctgaccatgatggcaggagccgccatggaagccacgcggcagggtatcctgtatccgtatgaaagaggaagaaataatcccctctcctcatcgccgcacatgaccacagctccatatagcccggtaatgaacacgtaaacagccaccaggcccctgaccggaaagacatctgtccggctgctggcaacatctatttcctctccatccctgccctgaaactggtattcaaaccggaaggtggaaccactctccagccattttgtgtaaagctcctttgcctgtacggctgcttcctctctggcttcgccgcctggtgctcccagatggtcaaacagttcattttcagccacataatctgccagcaatttcccatcgtatatcttcataagggctgcaaacacagtctccgtggagagagccgaagccacggtggacggagccgaatatacgccgatagaacgcttataggatttggtatccagtttctcctccagtccggcatatatcacataaccgcattccgcccgccgggacgccacttctgcctttacctcttcctcgtcacggcacagatagaaacggaacattcccgcatcctctcctctcggccggttcacaaggctgtccgccagggcatcacccagggagttctccccgctctcttccacactgatggctatacttatgtcctggcttccctttttctgggcctggccggctgccagcaccccggtaggaaggagcaggaggatgaaaagaaaggaccattttctcatatatcgcttgcatgacagaaaaaaccacatagcgacccgcttcattccctgaccacctccgctcccacgctgagcagaaacccggccatggccaggactgccagctttataaatactgccaggctaaaagaagatgtgaccaccagcttcatcccctccatcagcacataggtgggcagaaacggcgctgcagcccggaaggtggtgggcaggaataccaggggaagaaatcccccggacaaaaagtgcatggcagtcaccgccagaaacagcagcatgacaccgcccatcaggcttccggccgcctggtagaggaacaccaccagggacgcggcccccaggcagaccatcaccagggctgccagcccgggcaggctgaattctatcagccccgcaaaagacgctcccagagccgtacacagggccaccgacagaaacagcatccccacccctaaaatcctggctgcaaccagagtccccttccccactcctataagggccagctggcccttcatggacgcagagccggaggcaagataggctgatacgggaatggcacagagaagcagaaacagtacagctgtgctgatgccgtaaaagtgaatcgtatccacgtcccctgtggcactgactcttacattcttaaagtaatccatgcgcggcaggctgtaacccatataaatccggttcaggtccgcctccaggctgctcaccgaatccgccatgccgtaaaggtacagcagttcgtcccccgcgtagattcccgcctggctggctcccagagtagaggcgcctgcatcagtcagttctttgaaaatgcggctttccagacccgctccttttggcagcagaattttcaccggggtattggttccattcataatatcctgcacaaatccctccggcacctccatcactgcgtacagttttcctgctttcagcttatccaggcattcttctttattcatatattcaaaatcgcagatgctcttgacgctttccagcgaactgaccatggccagtgccttcttcgccacagcatctccttcaggaagcactacccctacggtaatcctccccgccgatgtttccccatacagcatcctggctgacaaaagggcaatcgtacccgctaaaagtaacagcacgattgcccctgcaaagatgtggggaagctttttacatgctcgtttcaactcaagcctgagataaaccagacgtgcagacatatcttcccattccttttatcttattaatacatggatactcccatctggctgcctaatcccatgacgccaaacagcatttccatccctacattggtccaatcctcttccgtggcagacagcacatccatggtctcgccctctaaaggactgatttcgccttccagcggctgatagtagtattcaccgctgagaaccacattcacggaatcatccataatggatgtctccagagaatcaatgttcacatggacggattttcccttttccagctggtccactgcgccttcagcggaaatcttcacaagctgtgagccatttcctcctacctcgcctgacaggtggtagcttccgtccttggaatcatatgtactggtgtatgtaaagttataggtctcatcaccgggaacagtcaaacccagggaaaggtcgctggtcagcacgcttttatcgtagcttccctgcttcaccatatcaatgctcaccgtatccgtggcatcctccagcgtaatgctggccagggcattctgagtcagataggcgccgccctgaagctggcagctaaaggtcagtgcaatatatccctcttcagaaacatctgtatcctcaacatagagattggtggagccttccactgctgccaggcgtcccttcttatccacataaaccgtcatgtttacatcagtcagcgccttgtccagatattctatcatctggtccaccattttctttgcctcctcgtaggactgctgctgcatctcctccgcggacatggttccggtccctgacatggttccgcccataagctcgctcatcttaacagtggtctccagctgactcataaaatctgctttcagggtctcgtcctgaaggaagaaatcagaggactgacgaaggaattcaatcatggaatccttgctgacagtcacattatatcccttgcagcttacctgggcgccgtctatggtgtaggttcccttagcggccttttcaactgtcagggcagccttgaaattctcctgggccttgcatccttctttataacggttaatcagcgcctccacgtcaaagggctgtctgccttctgtctgtgctttttcagcctcgtccatcagctctgtgaaataaacagccatgccttccacatccacgccgttctgctccagcagaggtcccacggtaggcgaattcttaatacggtctgccagtccctctcccaggtccacggtaaacaccttggcggacagctccggaaccgcaagcatcagggtatcatccccgtaatatgcgttcagattggcaaggtccattccgctgtagataactcccatgttgaagaagctcctgccgttggtcttgtcatcctttgcctcaaagcgcaggccgcttcctgcataagcattgactgtcgcatccgagcagctgtccatcttaagtgtcaggccgccctggctgtctgctgtcttcactgtctcagcaaagtctttcaggccgaacagctcctcagaagggtaaacctgtccttccgggaatacattttcaaaagcgtcaatgaccacctgctttggatcctttgtggtcatcttcacataggccagcgctgcaacggcaatgacagcggcaaaggcgatgaccgcagccaatatcttgataaacttcttatttggctggggctcttccggcacagtcactgctgccggagccggttcctctgtttttacattctctgcttcggccgccggttcctctgcttttactgcctctgcttcgtccgccggttcctctgcttttactgtctccgcaccggatgccggttcttccgtctttactgcctccgcaccggatgccggttcttccgactttactgcctccacaccggacgccggttccttgtctgccggctccgggccgttgttttccggtgtctgatcctcatgttccatcggagccccgcactgggtacagaatttcacatctgcttcctgctctgctccacacttggtacatttcatatttctctctcctcccttgtaaaaggatccttccgctgccttaaatgctgctgcggctgtccttttgttatgaatctatcgaaattggctaatcagctcttttgccgacagtccacattcgatttcccttaaaactccgccttttagtatgcacatcctggtacacaaggccagctccgccagctcatgggacgtcagtataacagccccgcccgaagccatatattccctgagataattccggataatttccttacactccaaatccagggcagcccccggctcatccataataagaacaggagcatggttggacagggcgcatgctatgctgagccgcttcttcatcccgccggaaagctttcccgctgtacgatccagcatgcggtccacacccagcatggaagctgctccgtcctttaaatccgattccatctgctttctgcttcccctgtaccacaatagcaggttgtcccttactgtcagttcctccataagaggattctcctggggcacataagccgcctcctccgcaaatacccgcggatggcccgacgcctccctgccattatataagatactgccccggtccgctttctgggcacctgccagaatggacaaaagagtcgtcttgccgcagccgttataccccacaatgcccacacattctcccggagccactgtcaggtccgctcccgctaaaatattctgtctgtgataggacttataaattcctgatatctccagcatcgccgcaatcactcccgtaaaaacaatatatgatacaggactcagtgtaccatatattgggagggaatgcaaaataataattattaacgattccttaactatgccataatgacagtaacgttttttcgttgttttcaacgttatctgtaatgtttcagtactgtttttttaatgtttctgtatcgggtacgcaggcaaattcacagctggcaatatgtggatttggcggaaaaaccaaatgcaaaatcggaaaggaaccttctcccgaatattttccgccaatcatacaaaaactacgatggacaggaggtatcaccatggcaaaagcaggaatgagaaggcccagcccttacgacgctgataatcacggaaccgagaaccaccacaaaatgaaccatcccaaaaatgagcaggcccaggttcccgaaatccagggggctgccaaaaacggaaacgccaaggcaggccctatcaatgctcccaactgggcaagagatgattataaaacaggagagcattaaaggcatggaaaggcgggcctggccacatccggcgcccgcctgtatcaaatcaaagtttcattttttgttcatagcatcacccatacggtttacagtcatcccatttaacctaatgctcccagctccgccgccctgtacagcgccgccacatgtacggcctgttctaccccgccttccctcagcaaacgcttcacttcctccccctccaactccactacctccaaggcctctgtctcatccagattctggggtgcggccgggaatacattcctggccaggtagcactgggcatagctggtgcagttgctggcattcggggcgattttgaagaggaattccagactccctgccttgtatccggtttcctccagcagttctctggcagcaccgtcccttggatcctctcctgcctcgatgcatcccgccggaagctccagaagcaccttctccacgccgtggcggtactggcgcaccattatcaccctgtgctccggcgttaccgccaccaccaccgcaaaatccggcagatgattgacataaaagggggcaatgaccatgccgcccggcagctggcaggtgctggcgcgcatatcaatccatgaatccttaattacagttgtctcatccagtattttccatgaaagattcctattcagtttctcatctttattatccgccttcttcattgtccctctttttctcccttactttcctgcggtctgactttccatgaacagcctcactgccataacccgtcctccagagccgccatcatcaggaccagatgcagattcatagctgctgtcttatcgtcaatatagtggacatcccgctccatcttcacccgccccggcagcagttccattgcatcaaacaggtcctttgccgctttccgcgactggtattgtacatatgcatccttaatcattgcccacaacctcctttggttattataacgcttggaggatgctttttcccttatttactgccgggaatccgccgggtataccgcgctttcaccgcactgtttccccgcggacagactgtttcccaccatgccggccacaatcaccgcaattccggccagtcccgccggctccggaactctgtcctttagcagcaggattcctcccagcagggtaaataccacctcaccgcactgggtagcctctatcactgccagatggcgcggattctcttttaccaggtccgtggccttaaagaacaggatcgttgcaataacacctgaaaacagagccacgcacagcgactggaatacctgtccgcggcctgccggcccagcttttacccaggcccagccagacatgaaaatccaaaagggcatgctgcacagtgtcatgccgtaaacccgttccagggtggtcatgcctgccggacaaagcgccatcattttgcggtttcccaggggataggaaaatgccgccaccagtatgggtgccagcgtaaagagcacagtcctcacctccatccgcttcagatgaggcacctgcatcataaatacgcctgccagtacgagaacagaccaccccaggttccggattggtattctttttccaaataacggcgtcaaaagcacgccagccactatggtcagctgccaggtagccgctgccagccaggattcccccaacacggatccgaaggtaagaggtgcgtaaaacagtccgaaacccaccgtactccataccagccatgagacaggcgcctcttttacggcgctccacaccctgcccgccgaggggctccctgccagcataatccacaatatgggaaatgtaaacagatacctgaggctggccgcccacatccagtatcctccggccagattcatgcttctgttcaggataaaggtaaacgcaaagaaaaaggatgccagaatcccgtatatcagcgctttcttcaactcattctcctcccttttatgaaacagccgcgaaaagtccgtttcaaaaaagagggcactgcagcttgtcctgcaataccctcttgtaatcctatatcaattctaagttaagcaatcttggacttagccagctcagctaactttgcaaatccttctgcgtcattgatagccatttcagacagaaccttacggtttaagtcaacctcagctaactttaagccgtacatgaacttgctgtaggacaggccgttgatacgtgctgcagcgttgatacgtgcaatccacagctgtctgaactgtctctttctctcttttctgcctgcataggagctggtcagggcacgcattacagactgctttgcaatcctgtactgcttggaacgggcgcctctgtagcccttagccatctttaagactctattgtgtttcttctttgcatttaaaccgccttttattcttgccatcggtaattcctccttctacaattcaaacttacagatatggtaaaatcttcttcattacctttgagttggtagcatcggtaacgatatcttttctaagatttctcttcctcttagtggatttcttagttaagatgtgagacttgtaagctttattgcggactaacttaccggttcctgtctttttaaagcgctttgctgctgctctgctggtttttaactttggcattgtaaatttcctccttaaaactttctattttaacgttttgcagttaaaaacataaccatgcttcttccttcaactttggagggtttatctataactgcgatatcctttaaactctcagcgaaatcatccaggatgtatttggacttgaacatatgggccatctcacgaccgcggaaacgaagtgtcaccttcactttgtcgcccttctccaaaaactttctggcagctcccaccttggtgttcaagtcgttggtgtcaatgttgggtgacaaacgaacttcctttatctcgattaccttctgtttcttcttggcttctttttccttgcgtgccagttcataacggtacttgccatagtcgataatcttacataccggcggctttgccgtaggtgcaatcttcaccaggtcaagctctgcttcctgagccatcctcagtgcctcttttcccggcacgatgcctaactgctccccgtcctcgccaatcagccgtacttccttgtctctgatttgctcgttaatcattaattcgctaatagtcgtacacctccaaataagtcatgttgttctggaatcggcatgccccgttctttccctgtagggcaaaaaataaagcggacagcctggctatccacttcctcatataaaaccatctgctgccctatctcacacggaaactccctgaaataatacagcacatcgtttcatctatgaacccgggtcacatgttcgtgccagggtgaggcggatacctgctttcctgtcagtcgttctcacaacttatattaatctactacatttgatcgtatttgtcaactctaattttaaaacttttcttatgatttcttataatgcttttcttctaaacctttataaccctttctacagtcttcggcaaaagggcggggacgccttccggttccccgtaagacgtccccgcccatcctgtcctgattctgaatctatctggccttaaaggtactgcacctggtctccgtgcactcgcaggcaccgtcaccgcttatatcaatgcgctcagcgctgcagcggtgctcctcattgtagacacattttactgcgtcgcaggcaatctccagccttgtctcaggggtcttgaacaggttggtgaacttgcctcccttgttctcgtcaaagcttgcacagcaggtctgctctgccgtcttagccttgttgccatccaccgcaatggccgccttacagcagcagttgtcagcgttgtgcaggcagttctttacactacattccagcttggtcatagtccttacctccttctcctggtcttcattcttaccaatgacaaggatagtatgtacggattataatttttgattcataagccgcagggcttcaatgcattttccttcactgccgtccatgttataaagctctcccctggtcacaaaggtatatacctggatatcgtccacataggcgcctttgccgccgcttacgctgatggtaacatcagaaggctggcagttgctgaatttaagctctaccttccgctcctccttcacgtccacggtccttgtctgggatcccatgcgtatggtcagcctgcatttttcctctgcccctgtcctcagcttcacataggtatccttgcctgtgttgccggtcatccggccgcccaggttctggtatatatttccgcccgacggaatcattgcggattttccggtctcatcctccgcaatgtagcttcctccggaaaaacgccatccgtccataccgagtgcaaactgggcattgaacagcttattatccccataatcccggtaggtccagatgccgtaccccatggtggaatttttaagaatgggagcaacgccatccaggtacaatgatttctcatcatcccgcagctgggcattgtgctcgtatccaactgtattgtccgtaaacaggaactggtccagatacacaggcttgcctccgctgtacacatgaagccggttcagaaacacgggaatcttttccagtgcttccgctgccgtcacgcgctcatgctcattcataaagcccatgggaatgccgtacattgcgctggtataggcggcgctgccgctggggaaggtggaggaatgcataaagccctcctggcttccgtccttgtgctccaccgggtccacatccaggcgcacttccatggacagaccgggaaacaccgtctggctgtcagccagaagttcatttaaaaactggtcgtaaaacccataaaatacacttctggcctgggaatccctggccggaaaatacaggtcgtcataactggccagctcatggccgtacatttcctccaattcctccagctcataattttccatggcgtaatccacatatccgaaggctttggccatgctgcgcccctttaccccgtttcccagggacgcgctggaatccgtaaagttccagaagtcctcccatgtcaggaaccctccgcagaaattctcatgggaggatgccgcctggtacaggcggcccacatattccagccaggcagaccgctctgtcccctcctgcatcagcccctggtaccggtccatcacattgccgcccccgcagtaatcccaggtatatcccaccctcagcatcacactcagtccctgggcggcagctgcatccataacacggtccagcttgtcccaggcatattggttgtatgtacagggggtcatgccgggctggaattccctccagggtaccaccaggataatattgttaaagccgtcctgggcaatgcgggccagctcctggtccatattgccactctcgctgttccagaaattgatgacccagtcatcggaataataggtggctgatttgaggtaacctgctgtccccgcagcatggtcctctgccctggcaaacccggatgtaaacaggaacgctgccgcccccagtataaccgcggccttcatacatggtcttttcattggttctttctcctttagctgtggttcttttctccgcctcgtttcagctcaggccacacagtgagcagcatggtcccgaagcaggcggcgcctccgataaagttggatatgggctctgccatcagtatgccctgggttcccattccgaatacagtgggcagtatgatgataaggggtatgacaatgataaccttgcggaaaatggaaaaaaataccgcgtttctggattttcccagtcccacaaacacggactggcccgcaaactgaagggacatcatgaaaaatccaaagaaatacatgcgtatagccggaattcccgcctccaccatgtcgccctcccggttgaagatgcggataaagaacgccggaaaccagtccacgaatccccatgccacaactgtatacaggatacagaccacggacatgaatacaatggccttctgtacccttttatactccctggctccgtagttataccccagcacgggctgggcactgttggtcaggccgtttaccggcatggaaataacctccctgaccgagttgattacggtcatgattcccacatagaggtctccgccgaatttctggagcatggaattatacatgatctgtacaagactgtttgtgatggacatggtaaatccggacattcccaggcccacgatgcgaagcagccggccggcgtccagcttcatggccgaaggccgcagcttcagtatggtgcgcctgccagtgaggaaggccagaatccatagggccgacagcatctgtgaaagaatggtggccagggcagcgcctcttacccccatgtggaaaacaaagataaaaacaggatccagtacaatattggtgaccgcccccaaaagcacggtcatcatacccacggtcccaaagccctgggagttgataaagctgttcatgcccagacctgtcatgacaaagatattgcccatgagatagatcgtcacataagcgtctgcgtagggtatggtggcgtcgctggcgccaaagagatacagcatgggccgcttgaacatcaggcccaggaccgtcagcaggattcccactgccaccatcatcacaaaggaattgcccatgatggcctccgcctctttctcatttccccttcccctttcaatggaacacaggggcgcgccgcccatgccgaaaaggttggcaaaggcaatcacaatggatatgataggcaggcagagacccagccctgtgagagaaagggtggcattctccggtatcattcctatataaattcggtccacaatattatacagcacattgatgagctgcgccagggtcatgggaaccgccagcttcatgatatttcccaccacgctgcccctggaaaaatcgtttttcttctgattgtccgattgtttgtccatttgattatccgactgtttcatactcccaccacatttccatacattctgtctgttttgacccggccgcaccaaatatacctggaaaatgctgccggcaatgtctataccgctcccaaatcctctgttcggtcaatgtccttaagttcttcctccggcacctccatggtccacacatccccggggtgcgccttcatgattacgcttcctcccctgtcgccgcgaagtgccataagttctttcctgtaaaagctgctgaaaacagcgggattcccccgccttccctgatggcacacacagcccatgcccttccctgacagccggaaaccatgtatgaattctttcagggtgggcgtactcatatatggctggtcggccactgaaaacagaagggcctctgtttcaggagaggccgatgaagtccctaatctgagagaggcggtgattccctcaccgctgaatctgttgggaactgccagaagtccccggctctcagcctgctttaaaatcgcctcatactggctgaccaccagaacctctgtctggtgcccctctttctccagctcccctgctgcctggcagatgcagtcaagaccatggcggtaaagttcttttcctttaaagggtaccagcagcttattagagccaaaacggcttccaaatccggaagccatatagataaatgaaatcctcattccccttaaccatcctttaaaataaccgggcggagccgtccttgtcaagatgtccgcatgcaatccctgatgtctctcccatgcaatccagcatttctccggccagcgctgcttcctgcggggtgtcggcctggttgaatacaggcaggacctcggttcccggatgggctgcccgcagaggcagcagatatccatgcttcattagtgtcatcatatcttctttttgtatgatccagtctgtcttatgctttgcgttcagctccaatgcatctgtcccgctgccccgctgctcccggctatcctcatacatcttccggccatatcgtttcatcagagccccggcctcctcaatcctcaggcagcattcctcagcccgctttccaagggatgtcaggccattgagacataaaatcatatctgtattgtccggtatcaccggctctccggccctcggcaccttcaaaggcaggcgtctggagccgtcggcctccaccagcaccaaatccgccagggaacaggcttctttatataattcccagcctgtaaatgtaattttccccttctctgccgaccttccggctaccgccaggctgcggcgttccagaacggtcctgatttcttctgcattgccgtcaaatactccgaacgcaccggggcgggccatatgggtcgtggtaaccaccaggaccttaagtccccgtcccacagcctcccaggccagtctgcggatagtggatgtcttgccgcccgctcctgcaagagataccacaaaagggcccggtcctttcccggaccgtgcctgctttatccgtccattaagccccaggccatgccacaggctgtctgttccggtccatatgccgcactggtaaaaataagccctcatggcaatttctccatttttacagttaatgcaaacccttattttgatactttgactattttatcataaaacattggattgggaaagatgattttcccttccattcaaaacttacatccaaaaatcatcattcaaaaacagccggaaacaaggggaatcccctgcttccggctgctgttctattcctgctttctattcctgctgttctatctctgctggattttatcctgcccggccttgctccggccttgctccggccttacttcggcctgcccgggccttattccatccttaccctgtccttatttctggatgttattcctgatcacaccatacaaatcaaaactcaggataccaaacactaatataactccgatgactgccataactgattccttcctttcaaaatgttttccatcactgtgatagattcattatatgtcaggcagaccggttgcgcaatccgcattatatctaatcttttggtgaacacccatttgttttttgtgcatgaatgcaaaatattttagattacctaaaaatttttgtatttatttctttttacccatcctttcagctctgcgggcgatcagttcccctgctatgctgatggcaatttccgccggagtctctgctcctatgtccgtaccgataggcatatggcacttttggatttcctccagggagaagccgtccgccagcagcttatccgtcaccacccgtatcttgttcctgcttcccatgattccgatgtaataaggatgcagagccatggcctgcttctgcacgtaataatcaaactggtgccctctggtcatgacgcacacatagtctctgggacggatatccacataatcgctgatatgttccatatcccccaccacggtcctctctgcctgcaaaaacacctggggattggcaaacgcctccctgtcatccataaccacgcagcggaatcccacatgggccagaaccggaaccagctcctgggccacatgaccgcctccgaatatatagacagtcccggcctgtaccaggggctcgatataaaacgttcgtccatccacttccttctggaaagcattgctgccgaaaagttccccctctaacagctgtcccagccccttaataccggacagccccagactggggctgtaaaggcccatctgccagcatgtctcgtcggtgatatccagtataagccagctgtcctcatcctttgagagggcgtccaggacctggccgcagaaaccggtcagcacctggtcgccgggacggatgtactggaaatataccaccacatttcctccgcacaccattccgatatccgccacctggttcctggtaagtgtgaatcctttggcaaaggaaaccttgtcctccatggccttaagggctgcctgtatagcctggtactccacggcgcccccgcccacggttccttctatggacccgtccttccttaccagcatccgggagccggttcccctgggagtggagccggaactggcaatgatagtcaccaggacagcttcctccccctgctccagtaattgtcttaactctgtaaataatgttttcatgactccgtctcttcctccccggtaaaatattttttgtaaagccgttccccctccatgcgcagttccttttccatccgcaggtagcggtccagaaaatccttagacttgggcgtaagctgtgaaaatcctccctccgcccctcctgactgcgtaatcagcagcggatagcccagctgccgctccgcctcttttaaaatcttccatcctttggtataggacatatgcatctgcctgcaggctgtctgcatggagcctgtgtggtcgatcagagacaggaactgggctgcctggggtccgaaaaacccttcattgcgctccaatgtcagctgtacctggggatatacggccagcttttccctgcccaggctgcccagggcgcagtcctcgtccgattccacggccatgataatcccctcatcctccaccggaatctcttccagatgcccattgatttccggctggcgcagggcccctctgagtcctctttcaccgtgatagatcaaaagagacggaatggctgccttggacaccagaaccggatggccccgtttcccgtcatacacaggacaggcggccatggcccgggaacccatcatccgctgtatggtatcaggaaggaacatagggaatttggcaggcaggacaaatacccggtcgcataaatcctctatataatttaaccccatacagatgctgtaatacatctgagtctgctcataatcctggttgcgcaggcagatgacccgaagtccggcaatatgtttttccacctcgtccgccttctgccctgtaaccactaccaccggatcgattcccgcccgtttcagtgtgatgatgattcttcgtataaccgtgctgtcccccacgggaagcatgggctgaaaacggctgattgtgctcttgtggcctgctgcgataatgacagcccctgtcttcataagtctgttccgcctttcctggtatattaacagtctggtacgcgcccctaaagttcacctgtcaggagcaaaagggcggagggctctaccctgagccaccggggaaccactcccgccgtatcgtgggtgtggatatccttctccttcttccaccacaaaccgttctgtaaagtaatataccactcaaacggcatttcggaaatacatggagcgcatacttttataagatttgcgtcttcccgctccatataggccctggcactgctctccgacaggggttcaaaatcatgggccctgatgcccacgcctgttatggcgtcgcccacgggacggtccgtggccagctccagcccatcccagtccacggcccgtattctgcgttcccccagccgttcaatcctggatatgttcttacatcctgtaagcctggctgcccggcatgtaaccgggttctggaagatgtcccgtgtccttccggccgccagcacgcatccccggtccatgagcagcagattgtcgcagagctggtaggcctcatccctgtcatgggtcaccataatggtcacaccgtcataatccttaagggcgtccgccagctccaggcgcagcccttccctcaggtatgtgtccatggctgaaaacggctcgtctaacagcagcgcctcaggctcataggccaggctcctggccagggccactctctgctgctgtcctcccgacagctggcccgggaatcgcttttccaacccctggagccggaaccgctccaccatctcggacaccttctgctgcctggcttccccggacatgggccggcgccttctaagccccacatttccccgtcccccctttaatccaaccatgatgttctgctccacggtcatgcccggaaacagggcatagttctggaacagatagcccacacgccttacctggggcttctcattaatcttgagggcagagtcatagagaacacggcccccggccgcctctccctgggcatagcgcagggcaatcctgccctggtccgggcggatgatgccggctatggattttaaggtcatgcttttgccgcagcccgacggccccagtatgcccaggcatccccgtccggcctcaaagctgatgtccaggctgaaatcctttaatttctttcttatatcaacttccaaatgaagattgtattctgagttcacggctgttcccctttcatcccttccggttcacgggccttaatgctgcccagttcatcaatataatggacaggaatgcgatgaccacaataaccgccacatagcggtacgccgtatccatattgcctgcggccacctctgaatagaccgccatgggaagggtccttgttttgcctgctatgtttcccgcaatcatggcagtggccccaaattctcccagtccccttgcaaatgccaggacgcctccgctgacaacccccggcaggcctccggtcatgagcaccttccagaagatgccccactcgctcatgcccagggtcctggctgccgccaccaggttctggtccacctgttcaaatgcgcccctggcagagcggtacattaaaggaaaggacatgaccacggctgcaatcaccgtagctgtccatgaaaatgcgattttaacactgaaatattcaataaaaaactgtcctaccggccgtttgaccccaaacatatagagaaggaaaaaaccggccaccgtagggggaaggacaaggggcagagtaagcacgccgtcccaaatcagcttccatgtttcatttttcatgctcaccacagcccacgccgcaaagattcccagaaaaaacgtaatgaaaatcgacaggctggctgtcttcatagatatcagtatcggtgaccagtccatggatggttcctccccttttccttactcgccttttgtaaatccgtattcttcaaataccttcatggcttcatccgtcttaaggaattccacaaagttctttgcttcccccgggtgagccgtgttcttcaccaccgccacaggataaatgaccttcttggcaaggcttccctccggagcctctgccaccacttccaccttgtccgccatgctggctgcatcggtagcgtatacgatacccgcgtcagcgctggatgcggccacctggttaagcacctctgtcacgttggttccaaagcttaccttgtcctgtatcttatcccagattcccaggctggtaagggcttcctctgcatactgtcctgccggtacgctggcaggatccccgagagcaatggtctctgccttctcaatgtcctcaaacttctctatgcccgcgctgctgcctgttggaacaatgagcacaatcttgttctccagcaggctggtgatggtgtcagattcaatcatgccctccccgtccagggctgtcatctgctttgccgcagccgacataaacacatccgcctccagtccttcctcaatctgtgtctgaagcttgcctgagctgtcataggtacccttcactgtcacgcccggatactgctcctggaacatgggaatcagttcatcctcataggcgttcttaaggctggccgccgccgcaaccagaatctctgtggattcgcctgcctgggctgcggtggtctccccggcagaagtctctgcttctgtctctgctgcagtggcagttgcctgcgttgtctctgcctcggtagctgctgctgtctcctttgcgccgcctgagcatccggtcagagctgccgctgccatcattgccgccatcatcatgcaaatctgtttcttcataattaattcctcctgtaattcttaatcttttttatatacaaatacaggtactcgttatactcagacgaccatatcgtttcccacataaatgcccatctgctgaggatgagcatttataccggacaaatacctgtattcctatatttctgttatgggtctctccggagcatgtctgaacctgctctcaggcgcgcacctggcataggtagcgggtgctatattcactgataattacgcagcgccgtgttatcttctggcacattccgaggcgcttcccctgagtatcttaaggccatggtcaaggcttcccagaatgaagccaagactctccttaaccgctttggggcttcccggcaggttcacaatcagggtcgttccccggataacagacacgcctctgctgagcatggcccggtctgtcacctccatggacttcatgcggatgaattcagcgattccaggcgcattgcgctcagccacagccatggtggcctccggcgtctgatccctgagggaaaatcccgttcctccgctggtcagcaccaggtccacctggcggctgtcggccagacgtataagctgggtctttaactggcccggctcatccggcaggagcagaagctccaccacctcatacccggctgcctccagcatctccttggccgcaggaccgctctcgtccttccgctctcctctggcgcccttgtcgctgagggtaatgacggcagctgtaaaaggccgttcctctgcaggcggctccacccgcatcacatccccggggcggataactccctcacggatgactctggcaaacacgccttccttcggcatgatgcactcgcccatgcgcttgtagatagcgcagtggctgtggcattcctttcctatctgggtcatctccagctgcacatcccccgcgtatagtctggtacccacgggaaggcttctgaaatcaatgccctccaccaccaggttctcgccaaaggccccgtctatgacattggctccgcgctcgttgaacgccatcaccttatcataggagagaaggcttacctgacggtgccagtggcctgcgtgggcatctccctcaataccgaaatccaccaggaaatgcccctcttctatggccctcttctcaattccccgtttatcactgatacagatggccttcaccactccggtgggacagacaccctgttttatctgctctgacatataccttatcctccaatagcaatcatgttgtgtgcttctgttatctgacccggacgctcgaagcagtgggccgcgggtttgcataatacagcctgttccatggccttcctcagttccctctgaagcccctcgtcagacgggcagcccgcatagggccagcggtaatgcccctcctcctcaggccgttcctgtccttttctcagtatccgcctcagatccactccgtcctcatagcacagacagggtttcagatacccctgggacgtaaggcgcacccggttgcagtcgctgcagaattttccgtggatcgcgctgatcagtccgatactgcccttaaatcccggtatccggtagtagacagccggtccgaagccatggaccctgtcatcctcctccatatcggggtatgccctcatcatctcctccagcagctcctggtggttgatggtcttaaaattctttccgtagccaatgggcatcatctcaataaaccgcacatccaccggatattcccttgccagctccaccatctgccgccagccatcctgtccggcttcccgctgttcctcgtccatctggctgaaatcaatggacaccgcattgatttttacggatacaggcatggcgcaggcccgcctgacggcttccatcacagtgcccagggcgtcggttcccgttatcctctggtacaggtccctgtccagagtgtcaaggcttatattgatgccgtctatcccggcctccgccaaatcatccagataccgctccagcagcacgccgttggtggttatggttaccttctcaatgcccggcgtgctcttaagctgcttcaccagctggcagcagtccctgcgcaccagtggttcgccccccgtcaccttgatatggcgtatgcccaggccggcagcacagattcccacggcctggatctcctccagagacaggatatcccatctgggcacgcactccaccccatagggcatgcagtacttacagcgcaggttgcacctgtccgtaatggatatcctcatatagtcaatggttcttcccaatgcatccttcatattgctcatcccctgttccgggcacatctggggttatggaattccccgctcttgcctccgcttttatgttccaggtaaatgtctccgatctccatggacttatccacggccttgcacatgtcgtaaactgtcagcagcgccacggacaccccggtcagcgcctccatctccaccccggtttttcccgtggtcctggccgtgcagaccgcctcaatctcattgctctctttttttatggtgaaatccacggtgagcttcgtaagattcagtatatggcacagaggaatcaggtccgaggtccttttggcccccataatgcctgccactctggcaacccccagcacatctccctttgccatggttccccgggccaccttctccaggcactcagggctcataaaaatactgcctctggccactgcctcccgctttgtctcagccttatcccctacatctaccatcagggcattgccctggtcgtcaaaatgtgtaaattccatgtctgtttcctttccaacggtttccttttcaacggtttgttacatccctttgccgaacccgcagttggggaaggtacattccggacagttaaggcaaagcccgccctgtcccaatgcggccagatcatctgccgtcacctggtcatccgccatgattcggggcagaaccaggtcaaatatagtacgcctggcatacatgacgcagcccggaagtcccatgatggcaaccgtacggggattttccccatctttaacctggtaataggccagcaggaacatggctcccggcagcaccggcgcgccgtaggatacgatgtctgccccggtgttgcggatggcaagcggcgtcttgtcgtccgggtccacactcatgcctcccgtacagacaaccacgtccgcgcccttttgtatcatatccaggatgctggccgtcaccttggtatcatcatcgttccatgtcacatggtcaataacctctgtgtcaaactctgaaagctttccccggatcacaggggtgaaggtatccttgatacggccgtaaaacacctcgtttcccgttgtaacgatacccacctttttatgtaaaaatggtttcagctccaggatgggacatccccctgtggcctctgcggccgccttttttgctgcctccatcttttcttcctcaatcacaagagggataatcctggtccctgccagcttgtcccccttcttcactgcaaaattgccgtgacgggtggctatcatcatctgtccgaatccgtttaccgccttaagcccccggttatccacctttaaaaggccgtcacatgctgccgtcagctcaatctttccttcctttgcctgggaacgctccatatgctgccctttgcacatgtcgcagagaatctctgccgcatcattctcatgaagcattccgtcttccttctcccacacataaagctggtcctttcccacacttaagaggaccgggatgtcttccttcgtgaccacatggcccttgcggaataccgcatcctttgtcactcccttaataatctgggtgatatcatggcacagtacggtgccttccgcatccactgtctgaatcagtttcattctatttaacctccgcccgttatttatattttcaaataacgcattacatatagaatagcaccagcgttcgattttgtaaagatacatacactacaaatggaaattaatatatgtttttatcagtttataagagaaaatggccgggtgttccatctgcgcggcacacctgaccatttccacacccctatgaggtcattcctattgagatacggaaatgtatcattttaggaccttgtttctgtatctggctgtaatcattccagtatctgagattcatgtaatcctgaggtgtatccgcgtccaggtatattcccggatcctccacctccggttctgtaatcggcactcccaggtgctccatggcccccttaagccctcctgcgcccttataggcgcagatatccggtaccagccgggaatccatccggacaggatggcccggacggccgccgcagaccgggcgcaccagagcgcccggacattccatcacctgcttaaaggtgtcctgctctatcagcgggacgtccgcaggcgtaatgagaatccggctgcacaggccggcggccctggatatccccagtttcaccgagtcaaacatctggctggaggcataagtttcattgcggacaaacatgatatccagaggccacagataatccatcagctggtccgctttatatcccgccacgatgatgaccggagatgcccctgctgtcttaagattttcaatggcccttacaattatggtgctgtctcccagctccagaaggggtttgaattcatgcatcctggaggacaaacctgccgccagtatcactgctccggtcctttccataatatacctcctgaagatacctcctgcttttgtcactgcggtgtttcccgggactttggctaaacctcctgtcccggcgccttcactatgaccatgacgccctttgcccgggcagccacagcgccttcccgcttaatggtgccctgggcccggatggaacgtcccgttccaaactccgtcacctgcgcctcacactcaatccgttcccccacatggaccggggccttgtaatccagttccagatgggctgtcaccacatccaggtccgtatagtagagggcgtgtgccataaggtcatccataatggaagccatgatgcccccgtggagcatgccttcatatcccacatacggcttttccacggtccacaaagccctggcccagccttctccctctgtaatgtccaggtgcagccctatggggttcaggcttccgcagacaaagcagttatctgattccatccttctcatacacgtttcctcatttccctaaaaatggtctcccaggcgtccccaggtctctgagaacaggccggcatccatgagggccggtcccccctcaggtatgattggcttaaagcccatgtggtccaatatctgtgtctgtatatcaatgcccggagccacctcggccagcaccatgccctgggctgtcctcttaatcacgcaccgctccgtgatgaatgtaacccggtttccctttgccaggcactgctgcgcgttaaaggaaagctgtgcgcaggattccacgaacttgtcaaaacgtccctcctggtcaatgcacatcttaccgtcttcaatgtggcatttcagccctcctgccgtaaatgagcccacaaaaatggagtgtctggcgttggccgatatattggggaagccgcccaccccggctatcctgccgttgaggaatgtggtatttacattgccgtccctgtccacctcgctgagtccgaatacagccacatccagtcctccctggtcaaagaagctgaagtggtctgtctggggatacatggccaccgggttataatgggcgccaaagtctcctcccggcgcaggaattcccccgatgagaccggactctgatataagggtcacctgtgagtcaaccccttcctccatgagcacattgggaaccagtccgggcatcccgatgcccagattgcacttgtctcccccatgtatttccatggcagtgcgccttgtgaatactttcttatcatctaacggaaggggcgctgcgctgttcttcatggggatgcggatttctccggtaaaggcaggattaaagtgggtgatatgggtctgcatcatgcgatccggatgctctgcaacacatatataatccaccagaattcccggcaccttcacattcctggggtccagggtccctgtggcggccacccgctccacctgggcaatgacaacagcacccgctgcctttgcagccatggccaggtccagcggctcgcagggcatgcattccttctcgtatgtcagatttccgtcctcatccgcggtggtggcccgcaaaagggccactgtcagcttgggcagtgtataaaacagatactcttctccaaggaagtcgggaatgtaggtgacaatctgtttcccttccttttttgtcttttcattgatcatggccccgtcgtatctcgggtccataaacgtgcccagtcccacctttgtcagaagcccgggaaaaccccgtcccatttcccgccaaatctgccccaccactcccaggggaatgttgtatgccagaatcttgttgtccacgatttgttttgtcaccttaaaggaacatcccacatggccgtgtatgctgcatgaaagcagtccgtcgtgagccagggcacactcccccctgcaggtttttccgtcctcagacatccggccgaaatccccctggcctgcgccgtggatatgggtaatgcccgatgggtgtcctgtttccataaatctgttctcaattgcaagcccgatttcctcaggccagcctgtcattccctgaactgccgaaccgatgaccgctccgtcctgcaccagctctgccgcctctttcactgttatgatttttgccatgtatccataccgtcctttcctgtctctccggccctctgaccagagacagctgtctccctatctgaccgccgcagtcctcctgattccgtttccggctccgtctgccgcggcacccttccttccagatgctccctggcaaggcttcgcagctggcctttggatatcttcccggtagctgatatggggaaatggtctgtcagctctatctcctggggaatcttgatggtggcgatttttccccggcaccagttcctcaggccctcctttgtaaccaccgcaccttcctttggacggatgaaggcatataccagctcgccgtactgttcatccggcgcgcccaccacggccacgtcctccaccggctcataattgcgtataaaatcttctatttccctggggcttatattctccccgccccgtatgattaaatccttgcatcttcccttcagggtcagaagcccgtcctctgacagagaggcaatatccccggtgtgaagccagccctcccggtccactgccttttccgtctcctccggattgttgtaataccccatcattactccgtagcttttgatgcacagttcaccggcctggcccggccccagcacccggcctgtggttaaatcctgtatccggcccgtaacccccggccacagccttcccacggtggagaccgctgtttccagactgtcgtccatggaggtgctgctgattcccggtcccgcctctgtcatgccgtacatgacaactgccgcctctgcccccataacccgtttcatgtcccttagggtctgttccggacagggcgccccggcggtgacgcacaggcgcaggcataaatcctccccgccggcctttccttccctcatctcccggataaggcggatatagacagtaggtacgctgcacagcaccgtgcaccgctccttcctcagcatttccaaaaggcagattctgtccgttttctcgtaacagaccagggctgcgccggccatcatggaactcagcacggatcccacacagccaaaggagtggaacatgggcggcgtcatacacagccggtcctccttctccagccccaggtactgtacatgaatccaagcattttccagaatctggcagtgattcagcatcacgccctttggcacaccgctggtaccggaggtatggataatggtggcgtcgtcaaaaggacggaccgccttcatcctctccttcagcagactgtcatccattgacattcccagttccatcagcttctcaaactgccaggcacagctcctgggccgttcctggtccgtgacaatcacatggcgcagcaaaggcagacggggcgcataaatccttccgggaacagcctccttaagttccgggctgatctggtaaaacatgtccatgtgctccctgttcttgattccctgcttaaggatgaccgccttcacatccgccctgtggagcaggcactccagcatatccttcttttcgtggatgttcaggttcactatcactgccccggtcttctcgatagctattttagtcaccacattttcccagcaattatccatgataaccgccacatggtccccttttaagatacctatgtgcatcagcccttttgccagaccgtcgctgcgcctcttaacctccctgtatgtaaggcgcacacctgccaggctgtcaacgacagcctccctgtcgggaaagcgccgtgcctgtatgtccgccagctcacccagggtcagatggatgtaccggttgagacagacatggtaaggcctgccctcccacatggcctccacgtactcccggccggataccaggggtttgttcctgcatatccctgaaagcatatccgcgaaggcctctgaacagggcacagcgcccctgaaatccagcaggcagccgttcctgtcaaagagaaaggaggcttccccgggaccgttctcatccctgcaaaccactgcttctattcttctctttccgtcaatcaggtcttccatccaaccttcccctatctctgagcctgttttttcatagctgtcagaacaaacaatataatcaatgccaccacgcccatggcacccactgccatcagcggcacgctgtatgaccctgtgttgtcgtagagactgttggccagaatcggccctatgtaaccgccaagggcaaatccgataaacataatgccgtaattaaccccgttatatttgattccaaaggcatctgccgtcagagccggataaacacccatgcttccgccgtaacacatggcgatcagcatggcaaataccaggaacagggccagtgatccgctttccgtaaacgcggacagggcaaagccgcttaccgctacaatcaccgccatgatgctcagagccggataccgccccactttatcggaaacccatccccagagcaccctgcctcccgtattggccagaccaatgatactgaccgcggttgccgccactgccgcgtccaccccgcctatggcctgggccatgggagatccctggctcaccaccataaggccgcctgtggcaaatatggtaaatgcaatgatcatcagataaaatcttgtgtcggccagcatcagcttccagttctttccttctgcagaagcacccgaactgttcttcactgccggaggcgtccaaccagtgggcagccatccctcaggaggttcggttatgaaacaggcagctatgattatcataacaccaaacaaaattcccagcacccggaaggtaaacatgacgccgccggaaccaatcagggactgcataataggcgggaaaatgatgctgcctgccccgtaagcagccgtggatatgcctgcaatcaatccccgcttgtccgggaaaaaccgtaccgtattgccgatggtaatgccataggcaaaggcaattccaaaaccgcagagaagtccgtatgtcacatagagcatggtcaggctgtggataaagctggtgcatatgagtcccgcgctgaacaggattcctcccagccacaccacatttctgggccccttaagcttcttttgaagtccgttgcccgcaatcatgggaatgggcgccacaccgctgcagattgtaaatgccagggccagctgcgacttctgcacctctgttccgaatatcactgccccttcgttgaaaagtcctgtctggtaaacactccatgcaaaccccgtaccgatacatatattaacaataacactggcaaccagtaccgcccacctttttttcatcagatccataaataaccttcttccttgttcgcctaaagacctgccgttaattgttatttttttaacattaatttgaaaaatatagttacggttccacctcctccggagcacatctgacacccgctccgggaaggtgaaaccataaactcccagtcatccatgtacttttatgcctggaccgcccccatatccagaatcatcttctttataagagcccttacctcctgtatcttatatgaattattggccatggccgcggtcccctccactgccagttcagcagcggcctctgccagcgcctcatccggcttcctgccggctaaaaacgcctccacctttttccgctccatgggcaccggggccacgccgcccaaaacgatccgcgcatcctctatgaggccgtccttcatcctgtatgcgtaagccaggctgacaatggcaaaatccactgcctcacggaccctgaatttatcataggccgtggtatatccttccggtaccctgaaccggacagccgtcaccagctcgtctgtatccagcatgtcagctgctttcaggcgggtggtaaagaagtccgccgcccttacggttttctttgtggtcacaatccgggcatctaacaggatgagcaccggtgaaatgtccgaggcgttgacggagtagcagccgcagttcatacaccgtccggcctccctggccgcttcctccccggtcagggtgaagctgtcctccttatccagggcccgctctgcggcagacagctctttgtcctttaccgcgtgctcctccttgacgcctgcggtgtcaaaatggataaatttatcttccctgcgccgctcaggcatgactgcatagcccctgttaatggcctccgccgcgttgcgcccggagcgcacgccctggatcacggtggccggtcctgtggtggcatcgcctccggcataaatcccggacttgctggtggcctgtgtgtccttgtccacctgaatcagtccccgttccagggcaaggccgtatttgtcgcccaggaaacttaaatccaccttctgccccgctgccatcagaatggagtccgccgataccctgagagtctcctcccggtcgtaccggggattgaaacgcccgttctcatccttgacggaggtacagcgcatgagctccattcccgtgacctggctgccctcatagattgcctttgatacgccgtaggacggcatgatttcaatgccctcctccctggcccttgcaatctcttccctgctggccggcatctccggctcggactccaggcaggccagggtgacgctctctgcgcccagacgcctggcggttatggccacgtccattgccacatttccgcctcccaccaccagtacatggcggcggtcctttttgttcatccactggttgacttccatcagaaactggaggccgaactccgtgaactcctcgccgtcaaatcccagcacaggacgtttccaggcgccggtggcatagaacacattgtcatactccttctccagatcctctgcctgtatatcctctcccagacagcagcccaggcggaagcggattcccattttttcataggcggcagccacctgcttcacataggacttgggcagcctgtagttgggaatggcataggtcagcatgccgcccggctcctccatcttgtcaaagaccgtcacatcatggcccgccttcctcagataataggcagcgcttaggccggccggaccggctcccactaaagccaccttatggcctgtctctgtttccggcgccctgtaaaatgtgtccgggtgctccagtatgtaatcccccacataccgctccacgccgtggatggacacgctctcatcggaaccgcagcggttgcactgctcctggcatgtatgtgcgcagaccctggatgtaatcatgggaatggggttggcttccatcagtatatgggccgctccctccacatccccttgccgaagccgctccatataggccggtatgtccgtattggccggacactggacagaacacggtgtggtgtggaccttcatgcccccgaatatggaatggtaacggttgtctcccataacggcatagcactcttttccgccctttctcatacagtccatcctgccgccgatgccgtggggatagcggtaaaaccagcagcgcacatcctggcatatgttgcctcccatggtggccacattgcggattaacggtgttgccacggagcgggccgcctgagagaggaccggagccttttcattgagcaggtccgactttacgatgtcgcagagttttgtcagggcgcctatttctatggtgtccccgtcctgctttatgtattccccgccccggacggtcttaaggtcaaccactttttccggataatcctccagaatctgttcctttaacactccaatcaggtcggagccccctgccattacgactgttttcccttttggggactcttttaataaggagactgcctcatcaaaggtggcagcgctctcatgctcgaaatatttcacagtgaatcctcccctcttatgctttgcctaacgccttaagtataactgccggagttgccgggtaatccttgatgtccacgccgattgcgttggaaatggccatcagcaccgcgctggctcctgccgcaccggaaatctcgccaattcccagggccttaaacatgaaggaatctatctgggattccatgatataggcgtcatatggcgggaattcattgaacgttctccacttataatctatcaggctggaggttaaaagccttcctgtggacggatccaggatacactcctcaaatatggctgtatcaatacaggcagatccaaatcctccgtgcagctgcatctccactgccttggaatcaataatctgtccgatgtccgtgcctccggccaccttcaccagcttggtattgccggtttccaggtccacctccgcctccacgaatatggccatacagctggggatattaaacatctccatatgctttccatatcccacaatgctcagttccttgggggccagcttgaacatgggcactaccagctgcgggttatcccgcacatagaccataaagtcctttgtgtccagctggtcaacagagcgcttaaagtaaagggcgcccagctccagggcttttttctttgcctccatggctgccagggatactgccttgcctgtggtgatggtgcctctggaaccgcagagaccgtagttggacgggttgaacttggagcccggctccgtgatggataccttttccaccggcacattgaggacctcggccacaatcttgcacgcgttgcttctggtacccatgccggattccgtgatatcacactcaatgatggccgtggacgccctgtggctgcccaccaaatccggaacaattcttacaatggcctctgtgttgtcctcgctgatatcagcatttccgatgacgcccatgcccacgccccttgccttggttccgtttacacatgtgggcacgttccagcccttccatttaccggcccatccaaagcggtccgccgcgttctgcatggcttccgggaagaacagggaggagcggctctgccaccaccgcccgtcgcgccagataaaccggtcgccgggagcaatataatttttcttaaacacgtccagaggatcgaaattgcccttcttcatcacggcgcacatcagtcgctccagacagctgttaagctcctgcccgccgtagccgcggacaatgcctgctgcctgtttgttggtcactgcgatgtggctgtccatataccagttgggacatttggcgcataccagctgtgcctctcccagtcccacgcccacctggccctgtatggagtccgcaatggctcccgtgtccaccagccagtcgccttccacagcctttacatagccttccttgtccattcccacctttgcggtgatggtgctgcccagacgtacctcgtaggccataagctgctctgcctttgtgagcacaatctttaccggctgcttggtgacaagggacagcatggcggcggagagcaccgttgtcataagggactgcttgttgccgtagcttcctcccacgttaaaggtctttacgctcaggttggaattgggaatccttccctcgcccatgagcttaagaatatgggagctctgggacgatgcccatatggtatactcattgccgccctcatatttggcgatgcaggacggggtttccggggccaggggcgaaggcattttgtcaaaggccaccttgtcttctgccacataggctgcttcttcaaatcccttctccacatccccgcggataatctgccaccagggaccgtccggctggaaatacttgattccgttgtcaacgtgattgcccttaaacctggaatatatctccactgccccttccttcagggcgtcctcagccgtatacacggcttccagctgttcatattccacatcaatcaggtctatggcctcctctgcagtctccactgtatcggctgcaatcagagccaccagatcccctacatagtaaaccttgtcttccatcaaaagcctgtgtacaggaaggcccagtccccactgttccggcatgttcttgtgggtgatgacagcccgtacgcccggcagggcttctgccctggatgtgtctatggaaaggattctggcatgaggataagggcttcttttggtctttccgtacagcatgtggggcactgaaaaatcgtccaggaaaattgcctttcctgttacaatgtcctttgcgtcttttctgggtgtgtacttgcccacatgacggtaattgggctgtttgatatcgcggtattcaagcttgctcattcttcaaaccctccttctaatccaatgaatggtcgctgtttgtaccatttgcatagggacttaagaacagttcctggcgtaccgggatgggattttccacatcatcattggcccggtgcatcacagccagatggtcctcctcattccccgccaccctgttaatggcccgcagcaccgtataatggctgatgcagcggcagtaattgcccgacatggcttccttaatctcatctcccgtgggatggggattttccagcagaagcgccttggccgccatgatgattcccggggtacagtaaccgcactgaaatgcatactcgtcaataaaagcctgctgaaggggatctaaccccttctcagggtcctccaacccttctatggtaacaatgtcctttccatcgcaatccacggtcagcagcatacaggacgtgaccccttttccgtccatgagcacggtgcagcacccgcaggctccttcactgcatgactccttggagcctgtgagctggagcctctttcgcagggtctgggatagtgtctctgaggggggaacctgtccgaatccgtccccgattgagaaacgatattccctcccgtttaccgtcagagtaacatattgtttcttcataacgtttccttgcctccttatctggattaagttaatgggatatatttgttaagattatgctaatataggtcggtcgtttgatttatttttatcacaatgtgatacatttgtcaatgatatataaatatcaatttatttattcgtatatttttacagatttaaacgacaaataaccctttggatttgtgcagcttgcactccaaagggttattctcatttgtgtatatcgtctaaatacgattattgggccggataaggcggaaacagctcaggcttcatcagccgctggacaatagccagacaatttccctttatctcctcccgtatccagaggggcacagactccccctccagcggttttggaatcagatcctctatgaatccccggtgttccccaaaggatatgatggatccgttgatatgtctgctggctataatggcctgggactgggaaacaggggccacggtctgaatcagctcagccatcacccgttcctgccggtcaaaggcagcggctgacaaaggcctcatatccccgggtccattgttctcccagtatatcagggcaagggtggtcttatactgtggggcaaaggccacctcaatctgaagatctatgagcttttcaaggaattcatatgccttctgcggagtcattgcatcctgtttaaaggtcccctcaatctccatatacgaggccgcataatatccctttaccttttccagcatatattccaggcaggctacgtacagcctctccttgttggaataatgaaaggcaatggctgacaggttcacctctgcctccgaagcaatcattctggtggatgtggctgcatatccgtactgcgaaaaaagcttaatgccggcttttatcagctttgtcttagttgaattatttccttccatgtgacttcatctccttatgctcagccggcagcccattcccgtatccgcgccttcctgtccacagatgcctggggactggtgccgaaggcatctgccgcctccaggcttcccatggccgattccagacaatgcctgactgcctgagcctgattatattgaagtctatggttctccctggcctggggggtggtgcacttgggcgcgctctgacggaaacgctcatcaatatccaccattctgtcctcaagcgtcatcttatccgccagaaacaaaagggttctctccgtcagccctgactcttccccgccttccagcctgtgatggcactgaatgattcctgccatcaccgggtatccctccatccgcaggattctggctcctgcccttgcgtggtccggcttcagacgcgcgatatcgtgaagcagcccggctgtcctcaaaagctcagggtctatgtcataccccagacgtttaagccttacagcccactggtgtgccagtctcgccactgctgcctcatgaagccgtatatgctcagggacgctatagcggtccgacagcctgcggcagatgccgtggtcaggatagagaaggggctttacaccggtctgctcataaaatcctctgaacccgccgtcatcgtctgccagaatccggctgattcctccatatggctggggaacttccagtacgcggttgatatcccacccaagaataccgcacatcagcccccggctcacaccgcagtgggtcaccaccgccacatccccccgggtattcccaagaatgcggttcagggcatcctgaagccgctctgcgccccgggcaaaggattcccctcccggaggcgggaccgtgccgatggaacgtcccctctcttcatagagctgcgggtaccggctgcggatttcagtgaattccatgttctcccattcacctgcatccagctccaccaggccctcttccacatgcaccctctgctgctctcctgcaatatactccgcggtttccatacacctggacagaggactggaataaacagcttccacacagcggctcttaaaccaggaagccagttccatgctctccttcctccctctgatactcagtgcgagattcgtatgtccaagacatctgctcacatgcccggtccgttccggttccccgtgccttataaggtatatcgtcctcatatgccacctcatttcgatgcatcgccgatactaaataggtcgtccgacctagttctgtgtttccagtgtagcacagatgcatttaaattacaatataaggtagccagaaaggccatattcttcaattatcgttatttaatctcataaacaacgttgacttgagtatatcacatatggcggatggctgtaaatataaagcgcctcaatgcatcttacattttctttgacttgattcctgcctgcagacccacctgagcagttccctgtactcttccctggtgtccacatccaggtaaatactctcatttccggcctccaggtcctctaccggcacgcctgaggcttcaatggcccccttaagtccctggtccccggcataggtgcagatgcgtctggcaatctccccttccatgcatatgggatgccccggttcgccgtcatggaccgtccgcacaatctgcccgggagcttccatcacctgcttaatgatatcatccgttatggcgggaaggtccatgggcatgaccaggatccgctcacacccttccagtgccgcctgtatacccagctttacggaatcaaacatctgtgtatggcggtatctggtgtttctgacaaaacaggcgcctgtgccctttaaatgatcctccagttcttccgccctgtaaccggtaaccacgatcaccgggtctgcccccagccgcctgagcatggacgtgacgtgaaatgctatggtagtgtccccaaacggcagcagaggtttgaaatcccccatgcgcgaggacagtcctgctgctgccaggacagctcctgttttcttcatgcttcccgcccctttcctgtaaaagaccgtcttaaaaggctgccttacaggtattatatccggccggagtgcgggattccagtagtgcaggatacaccctatacatgtgcaacaaagaaaaacacggaagcagattttactccggttccgtgtttttctttcattattcctactggcacatcctctcctggtgccgtttcagtttctccaggctgcggatgcagtaatatccgttaatctgttctatcagcgccatctcctttaaatccttgatggccctgaccgccgttacccggttaattcccagcagatttgacaggagctgctggcttatcttttctttgataagtattttcccatcatagggaaccccgtagtgctctgcaaatataagcagcagatcgcaaatcttccagccggcgttgtggaaattggtatggcgcacctgctccatggctgacaggaatttggtggagagggactccataatatccatggagagctgcgggtcatgggcaatgccctttaacagcatctccttggtgatacacactaattcagacggctgcacggtcttgaaattcacagctgattcctggtcaaagagaaggtttccttccaacaaaacagaattgctctcattgaaattataaatacgctcctcgcccgtaaccgttgtctcaaacgcagccacacgcccggtcttgactatgtagcagtagttgggctttgtacctgcctgcaccagcatatggttctttggaaatacctttctctgtcccagcttttccagacgcgatattcccctgggcagatatagaagacgtgatacaaaattagcatgcggcatctgtactgcggtattacactcctgacctaccatataaccaccctcccttttatggattttcaccatatgaatccccaaaaacgcctgtttccttcaacaaaattataacactgttagtattttaacaactagtagcctatgctacattatatcaaattttcatatgtgatgtaagtgtcatatatattgcagcagtaactttccacagataatcatttcgtgatacaatgaatcacgtaattaaatcataggaggaatggaattatatggaaactgtcatcatactgggagctggccagtttggccgcggagctgccagactgctgaatcaggaaaacatggcccttctggcgtttggggataataaccctgccctgcaccagctgaccgaatcagagcggacagagaaaggatttccagccaatgtcccggttttgccggtagatgaagccctttcactgaaacctgattatatcattaccggagtgacggacccgctgcgttccggccagcttaaggatcaggccctggaattgggatacgaaggcagatttctgatgctgagccagctttaccggtattttgacatacgaaacgccaccctgaaacggctggctgagcggattcatggacagggcctgcaggaaagcatagcagaactgggcgtttttaagggcgacacggcctggaagctcaacgccctgtttccgcagcaaaggctttatttattcgatacattccagggatttgacccacgggatataaaagaagaaaaaagtaagggatgttcctttgccagggaaggtgaattctctgacaccagcgaacaggccgtgctggggcggctcccctttccgggacaggccgtcatacgcaggggatattttccggatacagcggcaggactggaacaggagcgcttttgtctggtaagcctggatgccgacctgtacgcccccattctgtccggtcttatatttttctacccccgccttgtacccggaggcatgattctgctccacgattacaacaatgagcggttccgcggagccagacaggctgtggaggaatttgaaaaacaatacggccgcctgtgtctcgttcccttatgcgaccttcatggaagcgcggtgattgtaaagccttgtgattagcaggcaacaattgtaatctgacatcacatgtgacctgggctacttgtgtctgttaaatttatgacctacaatatctgcagacagtatgatagggtgataagggggagaatccatgaagacagttgttattctgagcaccgacaatcttggtatgactgtggcagatatgctgaatccgcgtgaaatgaaactggtcggtatgggagataccagacaggaaacctggaatgtattttcagacctggaaaaaggggaactgaaggaagaaatagagggaatgccaatcatgccggcagatctggcagtggcccttcagccggatgtcctggtcatcgcggccacggattccgaaaaaagccatgccctggaatacatggccatccgtgcaggatttctgaacgacattgttttcatccgggacctgcatgagcagttctccatccgatgcagcgtgctgcggcgtctgtgccgaaggctcaccgggctgggggtggagggaaatgtggcagagctgggctgttaccggggcgacacctcctggcagctcaacgtgctgatgccggaccggaaactgtatctctttgacacctttgaggggttcgatgaacgggatgttgacatggaacgaaagctgggatgctccgacgctcagacgggcctgtattccgggacagacaaggaaaagctgatggagcggatgcccctgcccggacaggttgttatccggaagggatggtttcccgaaaccgcctttgacattgaagatgaaacattttgtctggtctgcatggacgtctgcctgtaccagcccaccctggccggcctggaatttttctttccccgcatgggaagaggaggcgtcatcctcttaagcggatgcagcggcacccggtacaggggcgttgcaaaagcagtggaggacctggaaaccagatacggcgcccttcttatgcttccggtgggagacttagacggcacagtgatgattgtacatccgtaggatgggaaatcatagaataaaaatcaacttatggattccggacatatggaatccggaaacggcagcagccgcaggcaaaaaagcccaatcctttacgttcttcctatggcgtgctttaaaattgctttacatagcacgttccggctttcacctggcggttttgaggatggaaaagagcgcataactgcccgccgccaaaaaacgcatgcatctgtattggggaatacgcaggcagcgtacagacaaggagggatggaaaaggtaattttttcggggctgtaatcaagcagacggtacagcgctgtcggcctgtgcagccgcacaccggttatccaaccctggttgtagagaaattgaatggcgaatctcccaggatacgccatgctttgtattaaagaccagaaagggcgtattttatgaacttttacaaaaatcattttggtatgattatatcttctgttgtggctatctgtatctccctgattatggccacatcggcaatctttgttgacaaactcacgttcacgctgcccctgctcatcaagaactggggcacggctttcctggtgatatcattgaccggaatggcctttcctctgacggactggtcctttgccctttgcaggaaaatgggactcaggcccgaaaccctgccccatgtacttgtggaaaactttgttgccaccctgttttttaacaccacggccaccattgtcctcacagcagtcaatgtctttcacaacccggaaattgaggctgccgtggcagccggttttctgccaaatactctgaccgcatttgtgcagggcgtgcttcacgactggcccatcatgtttatcatcagctatgtattcgcatttttcgtgacaaaggcagccatcaggattgcaaagcaggctgtgggtgaacttaaatcccctcattcaccccagaatcagtttcaataaggaataacggccaaaaaggacatcccgcatcgtgactggtccatgcgcggatgccctttttcctttcatttttcctctgcgttccttctaccgttccttctaccgttccctctgccactccccttttgcattcctgccaaaggcactgccctcctttgcctctgcatagccaaggatggtggcatccaggttgcatatatcatttagggaccagatggtaaagttgtccggattcctgctgtattcatcgctctcatccccggcaaaaaacctccatcccgtatccgcccactgttcgctgggccggctgtccctgtacatatatccgatggcccgtccctcctcaatctgctttgaaacaatgcagcctccattatggggcagaagactgacccattcccgcttttccggcgcgtaccaggcattcctgtaccaggctccgccctcctccagcaagtgtaaggccagctttctattcaggtccaggaaggaaagcatgtcttcctcatcaccgcccggcacatcgtagacagccccgcagatacagctgaccgcatagtccttaaaggtgtggtaaaatacctgggccttgcggacctgatagtcggtcagctcatcaaatgtctccctgtctatgatgccgcaggcacaggccaggcgtcccagtccgattctctcattgatgtcccatgcatagaacccccgctcccccacatagggacggaacagggaggcccgcttaaaccgggtctcaaacgcccgtctgcccttctcctccagctcctccagatcaaacagcggcgcatcgcaccagaaggtcataaactgctcatactccctgcccgaggtaaactgctccatacagaccttttcaaggctttccctgtcatagataccatagagccggaacagatgggccttcagctcctctgacgccggttcatccccacaccggtaaagggtccggtaccccatgtggcacggtatccccggcgccctgcggcatgcggcaatcccgctgagcagcagggtaaatgcatgcctgtccgtctctgccgggtccggcgcttccggcattctctgtatctcctcaaccagatcctttacagcctgtgatactctgtccattctttttcctcctggtccttactgcatgtttaaaactatctgctaccagcatattacaactgtaatttaaatgcaaccttgattcacattcattttgatcctgcggccaaacaaatacgggcctcctgttcccggaagcccgcatcatccaaatcttatctctattcccattcaatcagacaccctgccccatggcagccctgccttcatacctgcactccccggatatgccctggtaatggcaggtgctgcaatccgtgacataccccacatacttctcagtctcaatataagccccgcacatgccctgatggcgggcgtatacctgaaggcacatatcagccacgaaattacaggcagtggctttgcccccgcaatacttacagacataatcgccgcaggccctttcctccgctaccacgccgttcggcaggcgcattttctttaattgacggcccataatggcagcctcctttccattttgaaagaaggcggcatgaagccgccttcctggtttcatctgctcatccgctgaactgcctttattttgaattcctgtcatccttcatgccgtgcagcgctctccagatatgctccgggtccagaggcagctctgtgaagtacacgccggttgccatgttgaccgcattggcaatggcaggcgccacaggtgctgcggagccctcgccagcttcctttgcacccagaggtccttcctcgtccggtgtaaagtcgtaaaaggtgcgcatcttcggcatatcaagggcagtgggcagccggtaatcgcggaagttaggattgagaatctttccttccctggttacattgtgctcatagacagcatagccaaggcccatgccgatggatccctccagctggccttccacggccctcttattcagtgcgcggccgcagtcatgggcaaatacaaattcatcaatatccaggacgccggtctcctcgtccacagtcagatgggctgctccggtggagaagctgtatgcaggcgcgtagttggtggtattgttgccgttatactgtgaattgtcggtacggtggtaataggatcccacgccaatcagttcatcgccgcccttgaccgtcatatacttgaacatggcgtctccaatggacatctgatattctgccttctccttgctgattacctttccgtccagacactctaatgtctccggcatcacaccccacataggtgcaatgacctcaaacagctggcgttttgcatccacggcagcgcggcgggccgcattgccggccaggaaggtaacacggctgccgtaagagccggaatcccagggcgtcaggaaggtgtcggacataaaggtcttgaccatatccatgggaagccccagttcctcggcaacaatggccgtcataaccgtatcggaaccctgtcctatgtcgtgggagccgatgtacagggtggccatgccccgcttgttcatgcgcagggtcacgcacgcagagctctggttgggcgcttccagcaccgcgaatccggtgcccgatacaaagccggtgcccgcaaaaccaatgccctctccctttttcagcttatccttcttctcataccagccaatttcctttgcagccgtatccagtgtctccttgtatgcgcagctggtgattgccagtccggccggagccacgtatccggggtctgccgcgcttatcttgcggaactcaaccgggtcaatgcccatctggtcagccgcgaactgcatgttcaggtcatgggcaaaatgcacctggcatgccgtatatcctctcatggctcctgcagaagggttattggtatacacacgccttgccaggaaatccacggaattcatcttgtaagggaagttggcccacaatgtggactgggcgcaggccgcaacaccggacccgccgtaaggcccgccgtccagcacatggtagcatttctttgccagcagcttaccgtctgtcccaaaggcagtgtcaatatgcatgtaaatggggtggcggttgcgcgtggtctggaatacttcttcgcgggacagaatcatgcgtaccgggcgtccggtcatctccgccatcttggcagcgcaaaggccaaaggaataggaatccagcttgccgccgaaaccgccgcccacaagaggcttgattacccgcacctggttctctccaacgccaaggcagcgggcataccagaactggtccacaaaggacatctgggtggacatccagatggtgtaggtcccattcctgtaggtagccactgcaccgtggggctccatggccgcatgtaccatacggtgggtcttgtaatccctgtgctgcacataggatgcgcggtcaaattcctcatcaatatccgtgcccgccttcatcacggactgcatgccgatattgtgtatgcctttgccctcccagtttacctcgggggcattctcctccattgcctcaaaggggtcaaacacccccggaagcacctggtactctaccttaatcagatccgcggcccgctgggcggtttcctcatccacggctgccacggctgccacatcgtcaccaacctggcgcaccttctcagaacacaatacttccttgtccgcgaactcagctgcaaattctccatttcccaccagggacttccactcaaagtccctggcagtgaggatgcactttacacctggaagcttctctgcctcgctggtgtcaatggacaggatttttgcagatgcataagggcttctgaccatttttccggtaagcatatccggaaacatgatgtcacccacatactggccgtgtcctgttaccttgtcttcagcgtcaatcctgacataattgttctcgccggtcagacggtaaaattccggttttttaaaataatgtttgtcacagtctttatgcattctttgcttcctcctcccagttcatctgcgcagcggctgcctggattgcctccacaatctttgcataaccggtgcagcggcacagattgccctcaatggcttcccggatttccagttccgtaggatgtttattcacatccagaagagctttggcggacataatcatacccggagtacagtagccgcactgcatggcccacttctctataaactgcttctgaatgggatgaagcatcccctccctggcaattccctccacggttatgatctcatggccgtcgcactccacggccagggtacagcaggagttaaccggcttaccgtcaagcatcacggtacaggcgccacactccccttcctcacacccctttttcgtgcctgtcagaaacaactggtcacgaagaaaatccagaagcgtcaggttatccttcacaatagcatcaaccggatctccgttgatgattaaacttatactatgtttcattcctgtctccctcctagttatagcattccatggcctgcttaatggcacgttttgtaaacacgcggatcatatccttcctgtattcggccgatgcgcggatatcagagattggatgacaggaattcattgcttcctccgatgccttcacaatcacttcatcggtaagttctttgccaatcagggcttcctccgccccgggtgcccgtaccggcgtggccgcaaccgcgcccagggcaatcctggcgtctgtgcagacgccgtcttccaccttaatcttgactgcgacgccgatgatggccaggtccatcgcctttctgaccgcgtgttttatgtatgcagccctctcattctcagccagcggcggaatcacaatgcctgtcacgatttctcccggctccagggaagtctttttgacacccaggaaaaagtcttcgatttgaatgacccggtccttgttgggaccctgtaccaatatcttagctccctgagccagaagattgggggctgtatcgcaggatggggacgcattgcagatattgcctgccatggtgccctttgtcctgatttgtgtggatgccactaccttggcggcatgagccactgccggattcttttctttaaccagaggagatgtctctatggtacgcagtgttgtcagcgcccctatttttaaaccttccctgtcatcgtattccagataatccaaacctggaattttcttaaggtcaatgatatactctggtgatataaccttgtctttcattggcggaatcagatccgttgcgcctgccataaccctggctgtgcttccaagctcaaggaacagattgcacgcctccccgatggtcttaggagcaagatactcgaattgaggtaataccatttacgttttcctccttacacttctttttattgcctgctaattgttacgttctccctgtatcataattgtagaaggaaacgcttccgcttgccagaagtgtatatcacagatgttgcaattgttacaccttttgtctctgtttcacgcgtacatcctgggtgaatgggaaatgcaaaaaaacagctgcaataaataaacgaatggccaggctgccggtatctcctgcggataccggcagcctggccatagcggatatggaaaccatctgcttgaaatgacagtgaaacgcgcagaatactatactccattattctgcgaagtaattctcaccttcctgattttccccttgatggtcctgtcctgaaggcctgccagaacctgagagcctttgcggttcaatatctccacaaaggtgaggctttccctgatatctatgattcctatgtcctccgcatccacgccctctatgctgcacacagcgcccacgatatcgccggacctcatcttggatttacggccgcccccgatggacagtctggtaatggaccggtccagcttctcccccttatgggggccgggtaccggcttctttctctggagggcccagaaagccttttcctcctcttcctctgtctccggacagggaagaaccggaagcggcactcccacatacgcctccgccttgtgaagcgtccttatctcatcctcagtcaccaggctggccgctctgcctgcctttccatttctcccggtccgtccaatccggtgcacataagtctcccttcccatgggaaaatcgtagttcaccaccaggcccacgtcctcaaaatcaattccccttgcggccacatccgtggcaatcaggtaccggaaccctccccgcctgaatgcgtccacatttttaagccgttccttctgctccatatcaccgtggatcatgccgcagaatatcctgtctcttctcagcttctggaataacacctggaccatttccctggtaccgcagaatatcatggcgcgctccgggttttccttcatgagaacgcgcttgaatgccgtatacttctggtcctgtgcgacgccgtacactgactgccggatgggaaggggcgtctccccctcctgttccaggaaaacggaaaccgcatcctttaccgtttcctctgccaggttcttcacatcctcatccagggtggctgaaaaaagaagggtctgccgtttctcaggaaggagccccacaatctgcctgacctcgtccatgaaccccatatcaagcatcagatccgcctcgtcaatcaccaggtatctcacccctgtcagcttcaggctccccctgcgcacatggtccatgacacgccccggtgttcccaccacaatgtgggttttctggcgcagtgtctgtatctgcttgtcaatgggaaagccgccgaacacagccggtaccttcagccgttttttcctgccaatcctgaatatctcctggctgacctgcacggccaactccctgcttggctccagcaccagagcctggggcaggttttcctcccagactatctgttcgcagacaggaatggcaaaggcagccgtcttgccggttcctgtctgggaccgcaccaccacattcctgcctgccagcacatgaggcagcacctcctcctgcactctggtgggatgttcataccctaacagcgccagcgtctccgtgatttcaccggataaaccgtagccgccaaaacagcggtccggttccgttttttgattattttccatatatctccatttctttacaagggagcttctacctgcgcccgccttctatatcttctttcacaaacatgatcaggaagctgaccagcagaagcccgcagctgacccatatggtgcgctccctgagataggctgtaagtacactgcccatgacggcacccactgcaaatatgccgatgactccatagtagcggatacatttatcccgatggtcctttttgcccgtatggcggtaccagtacaggttttccgtggcgctccgcagatttccgatacacatggtggtggcataggggcttcccttgattttcctgaaagcattgacctgaagggcgcatacaaatgagacaatgatattggctgccatattcatatcctggggcaggaatcccaccacaaaaagcaatatgatctcaatagccacaatcagctgcctccaatggaaccttctgtcctgccggtgaagccgttttacatgctccgccatatacactccgccggcaaaggccagaacaggagccagataccgcacagccaggttccactccctggcagccaaatggcttcccatgagaacgatattgcctgtctgtgcattggcaaacacatttcccctgcagtaatacgtataagcatcctggaaccctccggataaagtcaaaaaaatacccgttgacacagcctccgacatctgtccacgggtacccatactcttttccatctctcctgccgcctttcccaagttaggaatctgataaatctgattcttccaactcaagattttaccacagttcagattaaaataaaatagttaaatgtttcacagttttatcacgcttcaccaatctggctggtaatatagtccggtatctcctccgggcagatatccagggcagtggccagttctccaaacagcagcttccgggcgctctttacgccgtcccgctcacggatggacaagggctttccctttcccctgcggttctgctccatctctgatatctccttaatcatagatgccagttgagtacaatcgccggactcaaggatctgcctgtatgcctggggtctttccttgtcgtttgcatactgctttccctcaacagacggcagggccagtatgaactgctctgcttcctgcctggtcatgatttccctcatctttacctttgggctgtccaccggtatatagatggtggtatcctggtcaaacttcggtacaaggctgtaatacaccttgtcattattagagaagtcaggtttcgatatgccttccacctggcatacgcctacagttccatagagaatatattctccttttttaaacaaattcccacctttccgaacagatactgttcaagtgttaacggggtatctatatagtatatcacacttttccctatttgtaaaatgcaggcatccgacaaaggtatccggcacgtaagccggcaaaggttccggcactccggccggcggcattccttcggtgggttttcagaatcatttcaaagtcctgctgccgaaacaacgcaaaatataccccggtaacatgataaactttctcatgtaaagggctggacaattttacaaaattattgtattatgtcattacatagttagttctgactaaccacctggacaccaaaaaaggaggattttacatgagcgttgtcattatcggaggccatgaccgcatggtaagccaatataagaagatttgcaggaattacaaatgtaaggcaaaggtatttacccagatgagcgccagcctggataaacagattggcagtcctgacctgctggtcctgtttaccaacactgtgtcccacaaaatgatacgctgcgccctggacgaggtgggaaacggcacggagatcgtccgctgccataccagcagcggcacagccctcactgaaatcctggaagaaaaatgcgcggtctgtgccctataggcttttcaatcaatacccctgcttcacctccagcatctgtaagccctccaccacggagcctgcgatgcatctggccttgtccgatatggtgaagcagttttcatattcactttttctgggatcaatgtcagcgatcttaaatcccttcactaccggatacccgtcttttatgatacccctcaaaagccctgtcagggaagcttccaccgtgacctcgccctgtccggtcacaatgactccaatggcctggccctgctccaccatgtccccaatcagggccttgccaaagaaaatccccttggccggggcatggatgacccgctctgccccatagccgccgatgactccgggaattccggtattgggggcagcgcttccgtttccaatgatgcgtcccagattgtggcctctcatggtctctatcacaaggtccacatcctgaccggctgtgaagcccggcccgaggccgatggtcttatccgccatgtcccttgtggtccccaggttcttcttggccagtatggcatccaccagagcccagggacgcactttttcaagcactgcgcagttctcgtcaatcatgacgggcactgctccctgctccataatggcgcaggcttcctcatagccggaagccttgatacaggtaattccctccacctcagacgtaccgtcatatactgcttcggaaaaggccacgcatctgcggattgccgaggggtatcccgactccagcaccagcaccgggtatccgcagcggtaaagcctgtggatggtaccggtggcaatatcaccgccgcctcttacaattaccagttgttttgcacgttccgtcattttacatccatttccttccatctttaattattcgtccgcctgttcagctgactgcttcagctcttccacccattcctgtgaaaagtgctgttcaaataaccggtccagttcctgccttgtctctgccatgaaggcgtcgtatgcctccagaagccggactgcctgaggcgtaagggtggagccgcctccgtcccttcctcctgtctcccgctccgtcagcatgaacccccatgccttttctgactcctttaacatcttccaagctttgctgtaagccatgttcatggcctgggccgccccctggagggaaccggtggattccactcccctcagcagtaccgacatgccgggtccgaatgccttattttcaaaatataatttcagtgatatcccatagtgaagctgattctggtccaatgatatgcccccttttttgaatggttatgtttttttaagaataacgtcctcaaagataaaagccgggcaatcgccggcttttgattctctgtgcataaagctccaaactgctattctttcactccctttattatagcagatttgtctgattatgcaattcttttttcaggctgattccctgccgtttcataacctctgccagtctctccctctgctccggctccatgggtgtcagcggaaggcgcaggtcatccccgcagacccccatcaggccaagggccgtcttcactggtatggggtttacatcccagaacagggcttccatgatttccagaagctgaagctgcatccgtctgctctccttcacatccccatccaggtacagacggcacatcttatgtgtctctttcggcatgatattggccagcaccgacaccacacccttgccgcccagagacatgatgggtacggtctggtcatcattgcctgaatagatgtcaaatccctgcccgcacagggctgctgtcctggcaatcagggacaggttgccgctggcctcctttgtcccccgtatattgggatgctccgacaaaatcctgtaggtttccggctgtatggttaccccggtacggctgggcacattgtataaaaggatgggtatgctcacatggtccgccacctgggtaaaatggcgcaccagcccctcctgggatgccttgttgtaatagggagtcacctgcagcagggcatccgcccccagttcctgggcctttctggacagctccaccgcatgctccgtacagttgctccccgtacccgcaatcaccggtatcctgccgtccacctgtcttacggcgtagcggataacagccattttttccttgtcgtccagggtggccgactcccctgtggtgccgttcaccaccacagcgtccgtgccttcccttatcatccattccagaagccttccaaaggcatcaaaatcaagatttccatatccgttcatgggcgtcaccactgccgcagcgctgccctcaaaaatactgtgactcataaacatcagtcccccgattcaatcattatactatgaaaatatgacaaacccgtctttatggtaccaattatttccttctgtcatatagtgacaatatgaatccaatctcataaggagagtatccatgcatcaattcctcatactgggcggagactccaggcaggtttgcctgaaccggcttctcagtcagtccggttccagtacctgcttttactatgacagaccctcttcccccttctctctcagggaagccatggaagattcccatatcatcctctgccccgttccctttaccaaggacggtaaaaccattttctcagaaaacagcctgcccggcctggaaatacagaccttcacggcctgcctgaaaaacacccatatactctttggagggaatatcccttccgctgtcagggagcgctgtgaccttctttccattccctgccatgatttcatgaagatggaggacgtggcatggaaaaatgcggttgccaccgcagaaggtgcggttgcagaggccatatccttaagtccggtaaatctttacagaagccgctgcctggtaaccgggtacggcagatgcgccgccattctggccgaccggctaaagggcatgggagcccgcgtaaccgtggcgggccgcaatgcctcccggctggtcccggcccattgtctgggatacgatacctgcctgttaaaggaactgggcgccgtcataggagaatctgactttattttcaacaccataccgtccctggtactggacgctgccctggcaaaccaggttcaggaaaatgcggctgtcatcgacattgcctccgcgccgggaggggtggatttccaagcccttgaacgccggaatatacgggccagattatgtcccggacttcccggccgctgctcacccctctcctctgccctgattctttatgaggccgtcatggagtatatccgggattcacagactcagtaaggaataaggagaatactatggaattaaaaggaaaacatgtaggcctggccgtcaccgggtctttttgcacctttgcaaaaatagaacaggaaatcaggcatctgaaggagacaggggccatcctgcaccccgtcttctctggaagcgtccagtccacggactcccgtttcggggataccggccagtttatggaccggatcacatccatcacggaaatgaagccaatactgaaaatcgaggaggccgaacccattggtccaaaggggtacctggatgtcctcctcatcgctccctgcaccggcaacaccctggccaaactggccaacggaatcacggacactccggtccttatggctgcaaaagcacatctgcgaaacggcaggccgctggtgatatccgtatccaccaacgatgcccttggcatcaaccttaagaacatcggcctgctgttcaacatgaagaacatttactttgttccctttggccaggatgatccggtgaaaaagcccacctccatgattgcccataccggactcatagaggatacccttaaggaggccctggagggcaggcagatacagccggttatacaggggctgtaggactcttccgtcaaaatctctccgctgcaaaaatcactggggccggaagcatgctgccacagcatgatcccggcccctcagcagacatccgcgccagtatttcgctcaatattatatattcccttaacgaaagaacatgacatactgttgtcatattcaatgttctatccttatagaaaaaggccctgaaggaccaatctggcgaatcactaaattcagggagccggcacatgatgagccatagaaaccgcccatcaggccaggccctatgatacaggcatacgatacggaggaataaggaaatggagcttatcaaaataacacacggcaaccttgaacaggaacatatctgttgtgccatatcaaacaacaaagacattcaggtcatgacaaaaaaagcctggctcaaagaaagacttgacgagggacttgtattcttaaaatgcaatgtgaggggaaagtgctttattgagtatattcccgctgaatacgcctgggcgccgatagaagcggacgggtatatgtatatcaactgcctgtgggtatccggacagtttaagggacttggctactcaacgcttttgctggacgaatgtatccgggacagtaaggaaaaaggtaaaaaaggacttgttatcttatcctcaaagaaaaaaatgggatatctttccgaccctgaatatctgaaatataaagggtttgaaaccgcagacgcggcaggcccctattttgaactgatgtatctggcctttgacagaaatgctgacaaaccatgtttcagacatacggctaaaaaccgtgaggacatgccaaagggactggtcctgtactacaccagccaatgtccctttacggcaaaatatgtgccgcttctggaaaaaacagccaaagaaagaaacgtggagcttcaaaccgtgcatatacagacaagagaggacgcccaaaacgccccggctccctttacaacattctcactgtttcgcgatggagaactcttaacccatgagatactgtcggaaaagaaatttgataaactaatatcttaggctgacagcggttaaagacacatatcctgccccagcatctccctaagtttcatctgggcttcccggaaccaggcatccccattccctgaggccagcagcacataggccgtcttgcccagcagagactccagataccgtctggttcccccatccccatcattcaggtatgcctgccttccggtacgcgtcagatgctcctttgccccatatttcatgcagtaataaatctcctgccgcagacgtcttctgtagggggcgggaacccggacccgttcattcaccaccaggccggtcaccacctgcctggttcccctggtcagaatccgggttttcctcagattaggctcaaatcccatggacctgagaaaaccatatacctttcccttcacctcagaaccatcaaaaacacctgaaaatgtcatgtcatcgcaatacctgctgtatacaatttcccgttccccgcaccaggcttccatatactcatcgaagggcttcatcaccagattggagatggccggagacgtaggcgctccctggggcagacggtcatggcagcagcaaagggaggccagcatgacacccactgccggtggaaaataggctgccggaaatgcgtgatgcagcaccatgggaaaggtgatgctcccaaaaaaatcctcaatatccatcttcatgacaatcatcctgccctgatgcttccctgcgttggcagccaccgaagcccccttcctgtaagccgccgcgctgtcggacactgtaaatccgtccagcacatgatgaagcagattcctctgcacatttttcagaaggggatccggcaccagcagggtcctgaagccgccgcttctcttgggaatgttcaccctttggtaatgtttttccgcgtgattgctgagggcatagagacagcccattattttttcaggaggccagtccccggcccctaccagccggaaggaaagcatcatctccctgcactgctcagcgctgcaatatttccacaaatccgtccgggccatatctcttacctcctggaacccatgccgattctccggatcatttcccgggtcattttccgggtcattttccagatcatttcacagatcaatttccgaattaattcctgacaaatcaaacagttattacaaaaacaaagacaggagaagcaacacgtatccggataccgtaagatgcataggggtaccgggccgcaaagcggcgggcacatgaaatgtgcggatgtaccacggcgcagcttgcggacttatccctctgcttttcactccaggcagcgactcgctgtccgtccaggcttactgcctatgcaatattcctgaaaatgctgttgcttttcctgtctttgcttatgccataatcataggcaaaaaacattggattgtcaatgtacttttatatatgtgcttttatatatgtcccttttaagatgcacttatcccttaacagcgccttccatcataccggccttctggaacttctccagaatcaggtacaggatgatgataggtatgataaccagggtggtgcctgccagtataacgggccacggggtggataatccctcgctgaccggcagcagtgatatcgtcaccatcagcgtgtattttgcctgcttccttaagtagagcagaggccagaagaaatcgttccatctggcaatcagggtgatggctccccaggacgccatggccggcttgataaccggaagaatgattttggtgaagatgccgaagtcggaacatccgtcaatcctggccgcctccaccagttcatccggcacatcagttatatactggttcatgtaaaagatacccactgccgtggcaatcctggggattaccagggaccacaggctgttaatcagtcccaccttcttcatgatgatgaacaaaggcacacttcccacctccggcggcaccagcatggtggcaatgacaaagtaaaacaggaatttcctgcccggaaacctgtattttgcaaaggcaaagcctgccagggcgcagaaaaacagggaggtaatggttcccatgatggtggtgaacacgctgttgaaggcattctgtccaacaggaatcatttcaaacagacgcttaaagttagccatggtgggatttgacaccatcagggaattaaatcccgtgatgctctcactggtgctctttatggaaatcaggcacatccacacaatgggaaacaggcagataagggtgatgaatatcagtacgccgtataccaggaccgtggacgcatttttctttctgttcattttattccctccttctatatttcgccctgcttgtgtcttaccacaaactggatgatggatatgacaatcagaataagaatcaggataacgccgattgccgatgcataacccatgttgaatacattaaagcctgactcatacatgtactggaacagggatgagttggaggttcccggtcccggaaggatataggattcattgaacagcttccacatatccactgtcagtgtcacggaacagaaaaacaggatattctttaaggacggcagggtgatgaaccagaactgctgccacccgttggcaccgtccaccgtggctgcctcatagtaatccttggatatgttgagcagtcccgataagagaatcatggtgaaccatggtgtatatctccagacattcaggataataacaggtatctttgaaaatgtggtgctggtaagccaggggatcttgcagcccccgaatattgtcaccacctcattgaccagacccacgttctcatcaaacagcattcggaaaataagacccatggcaatggctgcacatatattcggaaggaaggtagccgtcttgaaaaatgccctggcggaattactttttaagtatctgctgtttaacagggacgcgatgagcagggcacagcagataatgaataccagtccggtgagccagtagaccactgtgttgcccagggattcccagaacatatcgtcaatcagcattttcctgtaattgtcaaatccgcagaaatccggagtcccgattcccttccagtttgtcaggctgatgtagaatgtccatatggtgggcaccagctgaaatacaagaaacaggataaaaaagggcatgataaacaaatagggagccctgtattttttcagtgcttttaacattcgctgcctcctccttaaggtttataaaaggctccctcctcggggcgggagccttttttgcattactggctgatttcagccttgccgatcttagcttttaagttcttatccatgttggcgatagcgtcgctcatggactggttgcctgccacgtacttctccagctcagcagaaatgatttcatctgcctctgcatcctgaggtgttaccaccaggtttgcagcgccgttctcaaggcacttgccctccatctcgcggaaggactggccgccgtagaagtcagatggctctttccagaatggatcctccagcatttccttggatactgggttggaataaggagcattctgctcttccatggaattgacccatacttcctttgcctgggtgtcaaaggtgaaatcataccacatctggcggaacagctctgaataaggattgtcgcccttctcgatgatggccatgtactgggatacaggagcgcctgccttgtcaacgccttcaaacgcaggagctgacatgactctccactgtcccttggtggcttcgcagttctttctcatgaattcatcccagaaagcaccgatgcagaaagtagctacctgctgtttgttgatggcgtcataaagagccggctccatgatggtggtctttaaaagaagtccctcggaattcatggtatccagggcgcctaatgccttctgtgttccttcgtcgctgccgattacaacttctccgttctcatcccagattttagcgccagctgacggcataagccccctgcggccccagtatctccaggtcttgctggttgggtcgatgtaggaaagataaacttccccgttgctcttttcctttaactggcgtcctgcctctatgtagccttccatggtattcatctgctctgcgtccacgccgtacttgtcaaagatgtcctggttgtaaaacagcacctggggccttacggaatccggcagcgcatagatgcgtccgccgatggtggcgtctgtggtggctccatctaccatcttatccagaagaggagtcagatattcagtctcatcctttaaaaggcctgcgcctgccaaatccatgatggttacagggtccagcatagctgcgtcgggaagatcctcggtggctcccgacagtgctgtcatggtaatcttctcacggatgtccgcggttccctctgtctggacaaactcaatcttcacatccggcgcaatatccttgtggttctccagccatgtctcaaaccactgctgtctgtactggggatttcccatggcgtaaaccaccagggttcctgcgggatatacggtcttttcactgtccgctgcctctgcgcccccgtctgccgccccgctctggtcaccctgggcattctctgccttgggcgctgcggttgtggccgcctggtcggtcttgccgccgcaggctgcaagggagcccaccaccatggataccgcaagtgccattgctaactttcttttcatcattctctgttcctccttttgatattcactgttacattattccctggctgcctctacggctgcctttaaaaggtccatatcctgctctgttgcaagggtgcagtcagctcccagaataaaatgagttcttccgaattcccggatgaccttccttgtctcttccttcactgcctctgccggtccgtccaccagtacgccgtggcggttgggaaggccgcccatgatggtctttccagcaaacatcttccgtccgtcctctaaactgaagggtgcttcatatacgccccagttcaccacgtctgcgtaggggccgtaatccttatagcggtccatgttcagctggtccttgcagatgtggaggaaacagtatcctcccgcgtccttgatggccttcataatctgcaggtcaaagggcttaatccatttctcaaattcctcatccgtgaagaacctggtctcgccgcccagagccgcataatacacgccgtccacacccagctcaatgtatgttcttgccagttcgcacatcacgtccgcaatacgcttcattcctgccagaaccgtatcctcatcctcacgcagcaggcggcagagcttctcccttacctggtcgtatgtatagttggggtccatcttttccagaggatggatggatgatgcggtaataccgtgaagtgtgcccagtataaatgcatccctgtcgcatccggccagaatcttcttaaccagctccacctggtcctgcatgaagccgtcctccatggtcatctcttttaccatgctgtaatcggatccattgttaatctcgcccatatagggaaccagattctcattcatgattttaaggatgtctgtatcagactcctcaaaaaatttcagatgggcttttacggccgcgtctccaaaagctgattccttaggaaaatgcagggaaaatccgctgggtatcttgtcaacttcttctccccggatagctgctgtcactctctctttttttgtcatggctgtctcctccattaatcatatcactgatgtgattagtaatcttactaatcgtgattataacactgccgacaagccgtgtcaaatattttttatccattttattaaaataattttatcatccgacataatttttgtttattttcacgctgtatgcaatttttattcaaaaaaaggatgtaaaattgacggcatcaatcttacatccttagtatttatgcattttcccgtatccaggggcctgttctcaaagggaatagttctcctgaatctgctctttcacattcagtatgtccttctggagcatttccacggcccgctccgtatcatgttttaccagggcttcaatgatttccctgtgataaaagctgttggattctgcgttctttttccaggctgtctggaaatattgggaaatatacgaacaggatttttgaagggctgcggcaatcacatcgcatatataaccgttcccgcccatctcacagagcttcaaatgaaaatccgtgttccggttccaatgaatggccaccatcctctcatggttatcctttgtgatggtatccagctgtcttaaatcttctatctgctcaggggtaattctctggcacagccgcctcagattgcctgtctccacatcaattctgaattccagaagatccagtatctccttcagggtcacaggaaccacctgatagcccacccttggtatacttttcaggacattatccttgcacagctcaataagggcctcccgcaccggtgatttgctcatggcgtacttttccatgatttccccttcatggatgatatcgttaggcttatagatgccttcttctatctcccggtagattccctccaccacggtttctttcagggttttcttcgtcttcatcttcttttctccaatgccttcccttttttataaaccagttccgccagcctgtaggatatatcataggccatggacacatccccgtccatccagtccttccctgtccagagctgcctgaatccactgaccgcttcctccgtcatgccccccggcgtggcgtggtccttaagctttgcttccaggaactctctggtctccagctgcaaagaaagaagatgcagctcaaaggacctgggggcaataatgtccgcgttcccggccgttcctgctctggttccattcccattcccgtttccgccttcccggccgtcatatggtccggctttgtttccggcctccccgcccgccccgcgggcaaaggccagggcgccttcataccagcccttttccagccaggccagcctgtccatctgctgcccgtccatctgtcgcccgtccatctgtcgcccgtccggcgctgcggcaggcgtaataagaccgggaaggcccagccttctgcggttcagcgcatacaggatgccggccgcccgggcgcagccgccttgaccgctctcatccccataatgcggttccagcccaaaacataagaggtacagcatatgataggtaatgctcatggacagcagacgcagggattcatccggcgtacattcaaatacctgtcctaggggtttgagaaactgtctgaccgcgtccagctgctccctgccgggaggacagccggggtcgtatgtaatcttattgaaagccagtgaatacacatccaggccgccgatcacagtctccatggccggcaggatgcatacggtcctgacaccgtcacccaggatcctggtataccattcaggacgcggactgggagcaaaggacagcagcagcagccctccacccccttgttccctgcggtactttacatagggctttatggtatcctctgccactcccgccacctcatggggcctgacggaaagcaccagtatgccgggcttatattccttcagcttatccaggcaattgcccgctatgatttcaaagccgtatctgtgcctcagctcttcaatccccctggaaccggccttcaccgcaaacatccgcttttcatatccttctcccagcaggcttctgtagcagggaaccatatacgccccaatccatcccataccaatgacagccagcctgtctgctccatcacccatcatatatttccatccttttacaactacatcctaaaattataatctgaaatgcgtcaggattcaataggggggattataaaaacagctcattttcccgtctgatatccctgacaggggaaagcttctgctccagcatggcacaggcctgctcaggcaggcttctggccttcaccggacagacggaaatacagcgcatgcagaggatgcagcgcgcctggtccgtggaggaaggattgcttacagggatagcctgcacaggacatctggcagcgcacagcccgcaggatatgcaggatgcgttggtaaggggaatcaccggcatctgcttccagtcacggtaaggacggtttcccggcacctgaggctcctgccagccctcctcttccagcttttcaagtatcctggccccaaagtcagccatttccttccggtcctgattatccggccggccggccgcgacatcccgtaccatggaatgttctgccagcagcgctgtccctgccccaatcctgaacccctgggcctttaagcagtcatccagttccagaagggcatcctcaaaggccctgttgccgtagactgccgcagtcagcgccactgccccgccgcctttcagatatgtaagcttttccgccgcatatccgggtatcctgccgccgaacacgggcacgcccacaatcacggtgtcctccggcccaaaggaatactctccctccaggctgcaaaggtccacatccttgaccttcttccccatctccatagccagattgagacaggccttcctggtgccgcctgtggggctgaaatacacaacggttatatgttccatcttattcatactgttacctccggaattttgtatgttggttcgatattctagttattttatcacattccgggaggaaaagcaccatctgaaaaacagaatctgtgccggcctgtaccggaatccattcctgtttaagcccggacggctctcccctcatgcagactgccgcccttcataaggaaaagcaggcgttttaccgcctgctttcaaaaatctagtcaactaccaccctggcataggaagccatggcctcctcgctcatctcctggccgattccgggccgttcattcatcacatatctgccgttttccggagcccaggcgtatttccccgctgattacagcccatatctcccgcgcttcacaaacttcccggccttctccaccaccacctgatggtccttcaccacctgggtaccgcgcaggaacacgctctctatgcgtgccgtcagcttccttccctcaaagggagcgtaatccacattctgtacctggtccgcagccgtaaccatatcctccacaccggtgcgcatgacaacaatgtccgcgtcgcttcccggggcaatggctccctttgtgggatacattccgtacagcttggcgggattttccgacaaaagctggcacattttttcctttgtaattcttcccgcgtccacgccgtaggtgtagagcagcgtgccccttgtctcaactccgggcatgcctcccggaatctttgtaaagtcatccttccccagcgccttctgctctgtggtaaagctgcagtggtccgttgacacggtctggatggttccgtccgccagagccttccaaaggcatgcgctgtcctcctgctttctcagaggcggcgcgcacacatacttagccccttccatgccggcaagcccgtacaggctgtcatccatgagcagatactgggggcatgtttccgcatataccttctgtccccttctcctggcttccatgatcacgtcgtatccctcccggcaggtgagatgcaccacaatcacagggatatccaccacctcggccagcctgagcagcctgtcaatggcctctgcctcagcggcagccggccgggtggccgggtggctttccacgcccattcttccggcagcctttgcctctgcctggagagcagctatcataccgctgttctcacagtgaacaccggtgattcctcccaccgccttaagcctgcgcaggatttcaaaaatagtcttgtcgtccacctgggtatcgtatgtcatgtacagcttaaaggaggtgattccggcctccatcatgtcgtcaagttccctgctgaccgacgggttccagtccgatatggacatgtggaatccgtaatcacaggaacacttgccgtccgccttctcatgccagttcctgaggccgtccgccaggctctccccttcatactgggtcccaaagtccacgatggtggtggtgccgccccgaacagccgccctggttcctgtggcaaaatcgtccgcagtaaccgttcccgccacatggaggtcaaaatgggtgtgtgcgtcgatgaagcccggaaagagcagacagccttccacatccacaatctgggtatcctcatctgccaggcgctccatttcctcaccggttcccactgccgccaccttttccccgtcaatgagcacatctgcccggacactgccgcttccgccaactacggttccgccttttaataccttcttcatatatatcactctcctgttctgtttctctctgtcaatctaacgatacgttccggctttcttccctttttcctgtcaccttgcggacatccggcacctgcatccatctgccgcctatgggcatctgtcacctgcgggcatcagccgccatggcctccagccgttccccgtcaatccggtacacggtccagtcactcatgggacgggcgcctattcccagataaaagtcaatgcttggcttattccagtccaggcaccaccactccaggcgtccgcacccccgttccacggcaatggctgccagccggttcaaaaaggcggtgccgaagccctgcccccggtactccgggcgcacatacaagtcctccagatatatgccggcccttcccaggaaggtggagaaattatggaagaacagagcaaatcccactgtctccccgtccttcatccccagaatcacctctgccttttccttctcaaacagccactggttcagcagctcctctgtagccaccacctggtcaagcattccctcataatcagccagctcccttatgaacctgagaatcaagggtatgtcctgtggtttggcaaaccggaattcaacggccttatccgcccttttatgttccattccatgccctgtcttgtcaagggtgttgtccatgatgtcatctccttatgcggaacaagcgaaaagcaggtggactgcctttcgccgttcatttccaatgttatttttactttttctttgaatagtacgtgtcatccatgggaagcgttgtcctcagcacatggtcctttgcataataagctccctgtgccgccggagcggttggtatggtggcaatttccccaatcccctttgcgccgtaggcaaaggacagcagttcttccttctccacatagattgcatggatatccggaatctgggtggagcgcatgagtcccagggtgccgtatttagcctggggaacaccgttctttaaggggaagtcctcggtcagggcgtagcccagtcccatgagaacaccgccctcaatctggccctgtatggaaatgggattcactacctttccggagtcatgggcagcatatacttcctttacccggccgtcgtcgtctaacaccaccacatgggttgcaaatccgtaagccacatggctctttggattgggtacatctgctcccagcttatctgtggggtcaaagaattccgcaaagaactcacggccttccagctggcttaagtctcctcccgcttcctgcaatgcctcattcaaatcagccgcagccatcctgacagcctcgcctgtaatcagggtctgacgggaaccggatgtggttcctgaatcaggcgccacctcggaattggcccccatattcctgaccatttcctttccaagccccgttgtctcggaaaccatctgtacgaatacggttgcacacccctgcccgatatcggaagcagcgctgtacagctcaatctttccgtcgcggaccgccagctttgcccggcctttatcgggaagccccacgcccacgcccgcgttcttcatggcacaggcgattccggccctgccgggattgctctcataggcatcctttacagccagaagagtttccttaagggctgtggagcagtccgcaatctgcccgtttggaagtaccttgcccggttcaatggcgttgcggtagcggatttcccacggggaaatccccaccttctccgccagcagattgatgttggactccagggcaaattcactctggcacacgccgaaaccgcggaacgcgcctgcgggcggattgttggtatagtagccgaagccgcggatatccgtgttctggtagcagtaaggccctacggagtgggtacacgccctctcaagcacaggtccgcacagggaagcataagctcctgtatcaaaataaatctcacaatccagtcctgtaaatataccgttctcgtcgcatcccagggtaaatgtcccctccatggcatggcgctttggatggaagcttaaggattcctgtctggaaaacaccacctttaccggcctctgcaccttaagggctgccagggctgctatgtgctgtgcggatacgtcctccttgccgccgaagccgccgcctaccagcttgttttccacaaccacacggtccggatcccagcccagcatgatggatatttccttcctggtatcgtagacgccctggtctgtggaatataccttcacaccttccttgtaaggaaaggccactgcgcattccggttccaggaaagcgtgctcggtaaagggcgtacggtatgtctgggtcaccacgtatctggaattttccagggccttctttgcatccccgcgggtaacgtggcggctctggcacagatttcccttctcatgtaccctgggcgcgtcctctgccatggcttcctgaatggagcacacgggtttcagctcctcataatcaatcttcaccatccgctttgccttctcaaggatgtccctggactcggcaaccaccagacagatggcgtcgcccacacagcgggtgatatctccctttgcaatcattacgtcccagtcctgctggagatggcccaccttgttattggggacatcctcggccgtgagcacggccagcacgccgggaagggccgctgccttcccgcagtcaatatccagaacccgtgcccgcggatactgggagcggacagccgaagcatataccattccctccatctccacgtcatccgggtactcgccgtagcccagcaccttttccctcacatccaggcggaaggcacgctttccgacgccgtactcatcccccttttccagtgactcctcaatccgggcgtcgcccctcagaatggctgccgtcagctggatgccttcgataattttcttatatcctgtacagcggcagatatttccctttaacgcaaccttgatttcctcctcagtggggtccggaacgcggtcaatcagcgcctttccggccatcaccatgcccggcgtacagaatccgcactgcacggatcccattgccccgaaggcatacacaaaggcttccttttccgcgtcgcttaatccctccgtggtaatgatgtttttgcccactgcccgcctggtggtcaggacgcaggacttgaccgccttgccgtccaccacaatagtacatgtgccgcaggcgccttcgctgcacccgtccttgacagaatgaaggtgaaggtcgtccctcagatagcgcagcagcggtttatcctcgctggtgcagcgttccactccatttactgtaaaacaaaagttctctcccattttatgcctcctgcctctacgcctttaccgtgaaaatgccgtcggcatccagtataattcctcttggacatttgactgcacacataccgcaggcgatacactttgcttcatctattaccgcgtggttattctctatcctgacggcatccgccggacagttctttacacagataccgcaggcaatacagcccactgaacaatcctttcttgtctgggctcccccgtcctggttcatacatgccgtataaaccgggtattccggtgtggtaatgcgaatcagaccaaggggacaggctttcacgcacaggccgcagcccacgcatttgccccggtccacctccgctactccaaagctgtttatgtggatggcatccgacttacaggcagccacgcagctgcccatgcccagacatccccatttacatttcaatatgccgtccggatgttctgccaagacctggcggcaatcccctgccaggtccccacggggaataaccgcctctgcgtgacagccccccaggcattgcaccacggctacttttctattgcgcttttgtgccattttgttcttctcctttcattattcttgcaaaagaataacgttacttttttaacaagcctttgccaaaggagtccccacattttcattgaggactcctttgtacggcaattcgcacacattgtaacagttcagaaatccgatgtgaactgtcaccacacattatctacagcatatatgaatagtcgttgatgactgtccggatgatattctggataccgtccggcacatctgcgtttacggtaccaaccgtgtaatccatgatcctgccctgaagccttaccctgcacacaccggcagcagcgtccagtaccgtgaagccctggtttttgctgttttccatgtcagcctcgttggcaaacagggtgaatttgtcaagatagggagcgctgtcccacggacagaagctcttacagttgccacactcgttgcacatataatccacgtggatgatctgatgcttctccatgcccggaacaaccagagagatattggctctgttggggcatacctcaacacagttttcgcagtagctgttgcatgataagcagcgggcgctgtcaaccacatggtcattttcctctgccagcctgcccttgcgtccgtagatggtctctgcgtcagagagcttgaacaggtcctctgccagggcttttccgataatggcctccgcagccatcttgccgtccctgattccttccaccaccgtggcaggaccgtacaggccgtctccggccacatagacacccttcacagaggtttccagcgtctcctggttcacctggggacgtcttctgctgtccagggcaatgccgaaactctcatagaatgcccccggaaccttctcgcctacagcggcaatcacggtgtcggcaggcacttccactgtctcatctgtctccaccacgccccggcgtccgctggcatccatatctcccagcaccatcttcttacagtacaggactccattttccagcttaacaggagccaggagctcagcgaattccacgccgtcctccacagccatgaccagttcttcctcatcagcaggcatgtagcgtctggttcttctgtataccagagaaaccttctccacgcctgcgtttctcttggctgccctggccgtatccatggctgtgttgcctccgccgatcacaaccacgttcttacctaattccaccttgccctctgttgccttaaaccgtgccaggaaatccagtgcgttcatggtatcccctgcctccagcttaagaacgccctgctcggacgcgcccactgccaggacaacataatcataatctttcttaagggcctctatatcggtgatttccttaccgttcaccatctccacgcccatggctgccaccagcttcacgtcgttgtcaatggcactgtcgctgatacggaatcccggaatcacgttgcggacaacgccgcccatcttctcttccttctcaaacagggtaaccttcaccccgcccctggccaggaaataagctgccgccagtccggccgggccgccgcctaccacagccgccttcttatcagaggaaacctcaggcgctttgagcttagccataaccgcctcaaatccgccctctgcggcctccagcttggtcctgcggatatccaccggggactcgtagaagtttctggtacacttgctcatacagttgtgggcgcagatggtacctgtgataaagggcagcggattcttattgagaataacctccagagcctgctcaaactcacctgctcctgccagctgcaggtatctggtgatatcctgatggatgggacagccttcctgacagggggcgatgaaacagtcggtaagcggaaccggccggttgattttcctggaaggaaggggctttaccgcctttacatggtgcttgtcggatttcacagcctccaccagtccggctaccctggcagcatccacgccctcaaaggcagcagcttccttggctgcaaataactgtccaatctgctccagtctctcataaccgcccggctttaacatggtggtggccatagttaccggccagatgcctgcatccacgatatccgcgatattaaagaagtcagcgccgccggaataggaaatgcgcagcttcccgccaaagtcctcagccagcttcccggcaacagacatggaaaggggataaagggactttccggacatatacatttcctcgctgggaagctcgttctgctttacgtcaacagggaacgtattggtaatcttcacgccgaattccagtcccttcccgtctgccagggcctggagcctctggagcatgggaaccgcgtctgagtactgtaaatcatccttaaaatggaaatcgccaaaggcaacatagtcatatcccatatcgtccatgatcttccttgcgtactcatatccaagcagggtggggttgcatttgatgaatgtatgtaccttcttctcctcaatcaggtatctggcgatgcgctcaatctcctggggaggacatccgtgaagggtggaaagggttgcgcagttgcatacctttggagatatggcttccacatcctccctggacaccttctcaaaccggtccagattgtcaaggagccactgcctgcactctttgaaaatggcggtctcggaagcatccttcatgccctcaatgaaacggtcaattttctctgtcttgatgccgtccaggtcatatcccacggacatgttgaactggaagccctcaggactgcccagtccaaattccctggccagcaccttgcaggcaaaccaggcctttacatactcgtcaaatgcctggggcacatagagctctgtggaccactcgcagttatagcactcgtcgtcagccttgatacacggcttggatacgggaaggtcctcgccgtccagcttctgtacggtcttaagctcgaagaaacggctgcctgccacgtaggaagccacgatattctgggtcagctgggtatggggtcctgctgcgggtccgaagggagtctccagcttacggccaaaaatctcataggttttgtccgggtctgcaatgaatggtctcttgatgccaaatacagcgcccttcttgttctcttcaaggatccagttcatcagttttccaaatggaatcggggtcataatgtcgctcatattattcttatcctcctttataaccagaccaggtcccagcaccggataccggggacattgtccccgggtcctccatccggctcagccgcccggaagacattgtcgtcccggggtgctgctttcccgccgccctgcaatcggatatcacttataaattatacattgcgtatgcgttgtttatatataggaaagaccagccatccctggaaggcgtttcctatggatgccggctgctgccccggcaattaaccgttgatggaatgggccagcttctttgcctcttcccttacctcataaaggatcttctcctcatccagtcccacaagctccctgttcttcatcagaaccttgccgttgcataccgtggtcaccacgcttcttcccgtcatgccgaacaggatgtgtccgtttacattggacgcgtccattggagtcagcgggatatagtcagtgacaatcacgtcagcggcagcgccttccttcagtacgcccagctgcttcttgaaatagcggttggcaatctttgcattaccctcaaagagcatctggggtacctcgccccaggccgcattggcgtcgcagaggtgatgtttgtgaagaacattggctaccttgaaggattctgtcatatcatgggtgtaaccgtctgttcccaggccggtgagaatgcctctgtgcacgatctccatggtaggcgggcatccgcaggcattgcccatgttggactcagggttatgtaccaccatggtatccgtatccttgatcagctgcatctcatgaggatttacgtaaatgcagtgggccagcagggtcttttccccaaggatattgcagtccatcagacggtccacaattctctttccgtacttcttaagacagtcgtggagatcctcgatgccctctgccacatggatgtggtatcccacctcagccggcttgttggctgccgccagctccatggtctcatctgagatggtgaactgggcgtgcattcccatcatacccgcaatcatgtccgtgtcatccgccagggcgtgtttgatccaggacgcgttttccataacagccgcccttgccttatccatgccgtccctgtcggaaatttcatagcacagacaggtcctgacgcccatctccttagcggcgtcctcaatggcaaacagggaatcctttatctccccgaagctggcatggtggtcaaatacggtggtgactccgttcttaatggaatccagataagtggccctggcgctctggcgggtctgttcattggtcaggtggcggtcaatggtccaccacatgccgtccagaatatccagaaaacccttggggtcatatcctttaatggaaagacctcttgccatggcactgtagatatgctcatgggtgttgatgaaggccggcatgatgacgcccccctttgcgtccacatattcggcatcagggaactccttcttaatctcctccagtgtgcccaccttctttattgcggtaccgtccattgccactgccccattttcaaaaaatggctgttctgggtctctggtaaccagacgaccgttcccaatcactaacataacctctctcctttgctttttattattttatgtacctgctctttaaatctgtcctaaacaccatcgggatttcataaactttaataagatagaacaggacttcctgtacccctatactaacaccatacaaatccatttgcaagcagaaaatgcaaaaatttttagatattcaaaatttttttgtaaaaacctcttgcaattccttttttttgtgctatgatggaatcataaacaacgcatcacaactttgcgaaatgtttattgtacaaagtcaccagatttgaagagtccgaggaaaaggaggttaagccatgtcatacacactagatttactgaaacagcttgctgatggccttgcgagacagttcggacctgactgtgaaattgtcatacacgaccttgaaaagcacgacctggaacattccatcgtgcacatcaacaacggtcatgtgacaaaccgccaggagggggacggaccttcaaaagtagtcctggaaacccttcacaaggatccggcttctttaaaagaccatcttggatacctgacccgtacatccaacggcaagatactgaagtccagcaccatctacatccgtaatgaggaaggagattccattgactatcttctctctattaattacgacataacaggcctgatgactgtggaccgttccattaaagctctcatcgacaccgaaccccaagcggacgtgaagcagcagcccgaacagattgtccacaacgtcaacgacctgttagataccctgattgaacagtcggtagcccttatcggcaagccggccgccttgatgaacaaggaggagaaagtcactgccatccagttcctgaacgatgcaggcgccttccttataacaaaatcaggggacaaggtttccaagtacttcggaatctccaaatttactttgtacagctacattgatgtaaacagccgcaagtcggaagataaaaaagcgtgatgataattaaggaggattatgtaacatggatcagaagattctatgggcggtcaatcaaatgcctaagacagatgacaagaacctgccgattatgggactggaggagattgcaaaggcgaggacattccacgaaagcttcccccagtacaccaaaacaccactcaccaagctggaccacatggcagcttatctgggagtaaaggaaatctacttaaaagatgagtcctaccgttttggcctcaatgcattcaaggttctgggaggttccttctccatggcccgctacattgccaaggaaaccggcagggacgtatccgaacttccctactcagtcctcacttctgaccagttaagagaagaatttggccaggctaccttcttcaccgccacagacggcaaccacggacgcggcgttgcatgggccgccaaccgtcttggacagaaggcagtggtacatatgcctaagggttccacccagacacgtctggagaacattgccaaggaaggcgctgccgtagacatccaggagatgaattacgatgactgcgtacgtctggcagccaaggaagccgacgaaaccccaagaggcgtcatggtacaggataccgcctgggacggatacgaggagattccatcctggattatgcagggttacggaaccatggccatggaggccggcgagcagttaaaggaatacggctgcgagcgcccgacccacatctttgtccaggcaggcgttggttcgctggcaggcgctgtggtaggctacttctccaatctgtatgctgataatcctcctgttttcgtagttgtggaagctgaggcagccgcctgcctgtacaagggcgctgctgccggcgacggacaaatccgcatcgtggacggcgacatggaaaccatcatggccggccttgcctgcggcgagcccaacaccatttcatgggatatcttaaagaaccatgtcaaagtattcatcgctgcccctgactgggtagccgcaaccggtatgcgtatgctgggcgctcctatcaagggcgacgcgcctgttacctccggagaatccggcgcagctccattcggcgcactggcagccgttatgtccatggatgaatacgctgacctgagaaaagacattggcctggatgagaattccagagtactgctcttctccactgaaggcgacactgaccctgaccgttacaagaacattgtatggaaaggtctggataaataacaatcacctatatcacacccaaaacaaatatcaatgtataatggaggaaatgaagaaatgaatctggattacgcaaaaatcaaagaagcagcaaagaactatgaaaaagacatgaccaagttcttacgcgacatcgttaaattcccgggcgagagctgtgatgagaaggctcacatcgaccgtatcgctgaagagatgacaaagctgggatttgacaaggtagacatcgaccccatgggcaatgttctgggatatatgggaaccggcgagaccctcatcggctttgacgcacacatcgacacagtgggcatcggcaacaagaacaactggaacttcgatccttatgagggctatgagaatgacaccgagattggcggacgcggcgtgtccgaccagtgcggcggtatcgtatctgctgtatacggcgctaaaatcatgaaggatttaggaatgttaagcgacaaatatacggttctggtaaccggtacggttcaggaagaggactgcgacggtctgtgctggcagtacatcatcaacgaagacaaggttcgtcctgatttcgtagtatccacagagcccaccgacggcggcatctaccgcggccagagaggccgtatggaaatccgcgttgacgttaagggcgtttcctgccatggttccgctcctgagcgcggcgacaacgctatctataagatggctgacatccttcaggatgtacgtgctctgaatgaaaacgacgctgctgacgacaaggaagttaagggccttgtgaagatgctggatgagaagtacaatcctgagtataaggaagccaacttcttaggccgcggcactgttactgtttccgagattttcttcacatctccaagccgctgcgcagttgctgattcctgttccgtatcccttgaccgccgtatgacggcaggcgagacatgggagagctgcttagacgagattcgtgctcttcctgcagttaaaaagtacggcgatgatgttaccgtatccatgtatgagtattcccgtccttcctataagggccttacatatccaatcgagtgctacttcccaacctgggttatcccggaggaccacaaggttaccaagtccctggaagaagcttataagaatctgttcggcgacgagcgtatcggtgtggacgcaacagcagagatgagaaaagcacgtcctcttaccgataagtggaccttctccaccaacggcgtatccatcatgggacgcaacggcattccttgtatcggttttggtcctggcgctgaggctcaggcccatgctcccaatgagattacatggaagcaggatctggttacctgtgcagctgtttacgctgctctgcccagtgtttactgcaagtaattaactaccttcgtttattgtccgcagggtgttgtcccggctgccgttaaaccgcggccttggtccgctggccccagagccgttcttctggcctgaggggcagccgggaagcatagggcatacgcccttcacactgctcattcgtttaccgttttccatgaagtcctaagtgacctgtttgtttcggcggtctatgctgaaggccgccggaacggctcaggcccgcttacattcatgaaagaacggatatcccttttatttttgtaacatccaacaacgatacccaaattaaaaattaatataataaaggagtcaatcaaatgaaaacattacaggattacattgataagttaaacagcctcaactttaaggaaatgtacgagaacgatttcttcctgacctgggagaaaactgacgaggaactggaagcagtatggaccgttgctgacgctctccgcttcatgagagagaacaatatttccacaaaggtatttgagagcggcctcggcatctccttattccgtgacaattccacccgtacacgtttctcctttgcttctgcctgcaacctgttaggtctggaagttcaggatttggacgaaggcaagagccaggttgctcacggcgagacagttcgtgagacagctaacatgatttccttcatggctgacgttatcggtatccgcgatgacatgtacatcggcaagggcaacgcttacatgcacgaagttgttgacgctgttacacagggccacaaagacggcatcctggagcagaagccaaccctggttaacttacagtgcgacatcgaccacccgacacagtgtatggctgatatgctgcacatcatccatgagttcggcggcgtagagaacttaaagggcaagaagttagccatgacatgggcttactctccttcctacggcaagcctctctccgttcctcagggcgttgttggcctgatgacacgtatgggtatggaagttgttctggctcatccggaaggctacgaaatcatgcctgaggttgaggaagttgccagaaagaacgctgaaaagaccggcggttccttccgtgtatcccatgacatggctgacgcattcaaggatgctgacatcgtatatccaaagagctgggctccatttgcagctatggaaaagagaaccaacctgtacgcagaaggcgattccgagggcatcaagactctggagaaagaactgctggctcagaacgcagagcacaaagactggtgctgtactgaggaactgatgaagaccaccaaagacggcaaagctctgtacctgcactgcttaccagctgacatcaacgatgtaagctgcaaggacggcgaggttgaggcaactgtatttgaccgctaccgtgatcctctgtacaaagaagcaagctacaagccatacgtaatcgctgccatgattatgctggctaagttcgctgacccggctgaggttttaaagaagctggaagaaaaaggaactcctagagtattcaaataaatcattcatcttaccaagcaatacaatgtaagggctgccggactgagtcctgcagccctttttgtctcaaattatgcaaaaactcggcgggataccctcatatcccgccctataaaggggaaaatcactatggaaaacaagaaaaaacgtattgtcatcgctctgggcggcaatgcactgggcaatacccttcctgagcagatgaaagctgtcaagatcacagccaaagccatcgtagatctcatcgaggaaggctgcgaggttatcgtagcccatggcaacggccctcaggtaggtatgatcaacaatgcaatggctgcgctgagccgcgaagacgcaaaacagcccaacacccctctctccgtctgtgtggccatgagccaggcttatatcggctacgacctgcagaacgccttaagagaggaactctataaccgtgaaatgtatgatattccggttgcaaccatgattacacaggtccgtgtagatgcagacgaccctgcctttgaagctccttccaagccaatcggccacttcatgaccgaagaacaggctaagattgcagaagaaaagtacggatacatcatgaaggaggattccggacgtggctaccgccgcgtggtggcatctccaaagcctgctgaaatcgttgaaatcggcgccatccgctctctggtagactcaggccagctggtaatcgcctgcggcggcggcggtatcccggttacccgtcagggaaaccacttaaagggtgcaagcgctgtaatcgacaaggacttcgcaagtgaactgttagcagagaatctgaacgctgatttcctgattattctcactgcagttgaaaaggttgctgttaacttcggaaagccggaagaaaagtggctggatgacctggacacagaagaagcaagacagtttatcaaagagggacattttgcccccggttccatgcttcccaaagttcaggctgctgttaaatttgctgaatcaaaaccaggacgcactgccctcattacgctgttggaaaaagcaaaagacggtatccagggaaaaaccggtactcatatccatttagcgtaaaggaggcaattaaaaaatgaatacagacaatacagcgaaacagcacgcatccctgtttgatttggatggtgtgccaaaaatgagccaggcaattcccctggcccttcagcatgtagtagccatgattgtaggctgtgtgacgccggccattattatttccggcgcagcaggcattgacacggcagaccgggttttgctgattcaggcttccctggttgtatctgccctggccaccctgctgcagctcttccccataggcaataagaacagtttccatctgggtgccggccttcctgttatcctgggcgtaagctttgcctacgttcccagcatgcaggccatcgcggaacagtccggcattcccgccatactgggagcccagattgtaggcggcgtgtgcgccattatcgtaggccttaccatcaagaagatacgaaagttcttcccgcctctgattgcaggcacggttgtgtttaccattggtctgtctctctacccaactgccatcaactacatggcaggcggcgcgggccagcccacctacggtgcatggcagaactgggtggtagccattttcactctggtggttgtcactgtgctgaaccattttgccaagggattcctgaaactggcatccattcttatgggtatgattgcaggctatatcttctccatgttctttggcatggtaagctttggaaatgtggctgaatccggcatgttccagcttcctcaggtcatgcatttcggcatcagctttgaggcatctgcctgtgtggccctgggactgctgttcgttatcaactccgtgcaggcaatcggcgacttctctgccaccacggcaggaggcctggaccgcgagcccaccacaaacgagcttcacggcgctattctgggctacggcttttcaaacatcataggagccttcctgggatgtctgcccaccgccacctacagccagaacgtaggtatcgtggctaccaccaaggttgttaaccgcgtgacattagggctttccgcgctgattatactggttgccggactgtttcccaaattctccgcccttctgaccaccattccctatgcggtcttaggcggtgcgactgtatctgtattcgcttccattgccatgaccggtatgaaactggtcatgacggaagatatgaactaccgcaacacctctatcgtaggtcttgcagctgccctgggaatgggcgtgtcacaggcatccgcctccctgtccgcattcccgacatgggttaccacaatcttcggaaaatccccggttgtcatcgcaaccctggtggctatcctgctgaatgtcacccttccgaaggataccggaaaagttaaaaagaattaatcctattattgtaatggtataactgaaaaacggactgtccctgagcatatcgctcccgggcagtccgtttttcagttatgctttggataaaccatacggcttaacaaccttcaaaagaaccatcctgattatccgtcagcagatgttcaaaatcctcctggggcatgggctttgcaaaaacatatccctggattacattacagcctgcttttcttaaaaattccacggtgtccatatcctccacgccctcggcaatggtctttatatccagctccttggccatattaatgacgttggacacaacaatgcgctcgcgcctgatgtcccggctcttctggaagaacaggatatccagtttcagcacatcaatgggcaggttctttaacaggttaagggaactgtaacccgagccaaaatcatccagggaacagataaaccctcgcgcattgagattgaccaccagctccgcaaataactccgtgtcagcagccagtatgctttccgtaaactccagctccataacgcggtccggtatggaatatttagccttgatatccgtatagtaatctacaaaatcattctggaacaggcctgccttggaaacattgaccgccaggctcaccggcctcccgccctgttccaggtgactcctgtaccaacggcatgcatgctcaaacatatagcggtccaatttcacaatcagctcgcttttctcaaataatgggatgaaattccccggcagtatcagcccccttcttggactgagccaccgggccagcacctctgccccggtaatctgattaccgttctgaatatctatcttgggctgcatatagagcttaaactcctcctcttccatggccgcctctgcctcagactccaggacggtatcctccagcatgcgcctgcggaggctgtcgtcatagaacacataggagcttcccggtctttcctttgcaatcttatgggccatgttggcataattcaccagcacatccagagactgcttcccgtcaccggcccggaaccggtagacgcctacaggaatctccatgaatggctgttcatccatgcccgaattcctcatatactccttaagctggcacagaccgctgtccagcacctgtgtgtcctcacaccgggttataccggcaaaattgtcagccgctatgcggcagctgatacagccaggtccttccactgtcctcagaaactctgccaccagcctgagaagcctgtcgccttcctcgtaccccagaacatcattaatcagcttaaaattccttaaatcaccataccagagcacataggaggtaagctcagaacgggagatctcaggacggttaagaaatatctccacttcacgtttaaagcccgcaaaattacgcaggcctgtaagagaatcactataagccagttccatcagcatcttctgattattcacagccatcttccgctgtctgctcatcagccatataaacaggctgcaggcaaccacaatgataatcatgatcccccatgctgtctggatgtagctggaacgcagcacatccacaggaaccatactcgcctgataccattgaccctcgatgatgggaaggataaccagcatctgcctgactccctgcctgtccgtaagtatgaaatcccccctgccggtgtctcttatgacctctgcaatcttctccttgttatcaggaagaatgtcaccctcaaatgtcttgatggtcttaagcacataattgccgtttgcatccagaatattggagtaaccggctcctttaagaaccggtgcgtcaatgatttccctcagtacgacagccgagtgaaccgcacagagaacgcccctggcattgccgctttcgtcattgattctgacgccaaaatagtttatatatccgctggcatcctgttggtctgcaaatgtgttggatatgcttttttcaccctgtaaagcccgttcaaaaaagtccatcccattcagattaacctcttccacattgccttccatatccaccatacgggcattaccgttaatatccgcgtaacccatacggataaaggcattttcctcatttatatcattcaatatggtcaggatctggttctcatccagaataaccagctctctgaggctaacagccagcccctccagcgtctgccagtctccctcaatctgtttcaaaatggatgtccttgtctgattcgcagcatcatacaggtatgccacgttctctttctggcttttcaaaatcatttgtacaagaaaaataatactgctgccaataaaacataagcatagtatgataggaagcagcgtgtccctgcggctttttcctctgccatctgcagttgtcatctcatagtacccctgtcttctttagactctaaaataataataatatatttatacttaaatatcaatgacaaatatccccggaaacagtaccatatgctgttatttgatactgtttccggggtatacacacggcgttattcacttgttttccattgggtaagtttcatttaatctaatcattcagctcataggaaaccgttacctgggcttccacactgacctgtccgggcataacagaagcagccgcatcttccgcaaccgcagccgccatcttggcagaaccgcctgcattataggaagcatatctggtctccggctgatagccgaattcctccacatggaccacaccggccagtgtcttattgctggcctccgccagagcctgggcttttgcctgagccactgccatggctcccttcagcgcctcctgatagctggcatcatagctgctggaaaaatagctgacggaattaataccgttgactcctgcagccactgactttgtgatgatggttcccgcattgtcaatcggtatgtcagagaccgtcaaactggtagtcatctcatatccggttatctcctgtttatctgaattccagttgcggataggactcaggccataagaagatgtctgtatggaagtttcctccactcccaggccctttaatgtctcaattgcagcgttcaggtcattggcattcttctcctggcaggcagcagccgtatcctctctggtatagacggcatattcaatctgcgccatatccggcaccacctttacctcctcgcgcccggtcaccgtaatcacattctctgccgctcctacattctgtaccttcagcgtatccggcatctgtgccccggccccgcacccgcccagccccaaggctgcagcggccactgccgcgctgatacctgctgtgtatactgttttcttcataatatgtttcataattgcctccctcttttttgttttatcggaatctaatcatatgataccgggcacacgaatatgccctatccctatactaccagaaagagggaattctggtatttcttttctcttaattatagaggtatgtttcattacaaagtttatacgaatttatttccggcaatgcctggagcttcttcatatcttcagttccataacttgggctccatatctttgctccatatcttcggttccatatcttgcctgctgatatttcaccgcggcccttgacagcggcaccggaaactgctaatatagagtgagcgcaggatttcgttagcataccaggtaagcgcagcactgaatattcaggggttgtactggtttcgacgggggtcatgcagctggtgaagctatccccatgcgatgggttaaatggcaaaaataaatataaacgctaacgacgaattagcaatcgctgcctaatggcagctgtcagacttagagtacccgcactttaagaccctggcatcgactatgtgggaaacgacgtatgcaaagctttgagcatatgggcgtatgatgaagctactgaaaccatccgggtgtcctttctctgatggcagagggaatgtcaaataaaggactatgatagtagaagaacagggaattgattttcggacaggggttcgattcccctcagctccactctggataatgtcggtttttccttattttataagggattccggcattttctttttagaaatgcttgattaccttttcaggctgttttcattggaattgcagcccgatttatctgctgtgttttggtattattattcttattactgtagaaatccaactactttaggaatttcttcttccgagaatacttgttcttctttgctgataatctttttagaaaatatgtttttggacaattcaagtcattttaaaaagctaacaatatctatttaagtcaatttctttttttagcccgtttaaatatgccatgtaaaagaagctatatagtgaaaaacaactatattataggatatcttgtaataggtagaaaattattcgattattttagtgatttacaaaaatactttatattcaaatcattgccgaacttctttttcattaaaatagccgtaccaatgctgatacggctccacaaaatactagtgacttagtttcattattcatttattcctctgcacttttatcaatccagttttccccatcatagttcaaaatctgttctgataatttttttatatatggttgtgctttctcttcttgcgcataccataccaatgattgaccaaacccatacgtacgttttcttgaaacaggcgcatcccatatgtgattatgtcgtttcccttctggtagtaaaacgcaatcttcttttttagccaaaatgttataatcttgtatatctccattgtcaagttccactgactgataattacgaaaaactgttgcattctggtaccatcctacgattgatgtttcattcaacattgtagtagcgcaccatattaccaatacatcatcaacttcttggtcatctttaagcaaatcacaaccttgaatattttcgatatgtagttcattgtgtttccctttgctggatgattttgtttcgacgaaccctaaacaatatgcttgtccatcttctgaaataactggagcaaaattatactgctcatttccttccccatgctccttaacaaagctgcccccattaaaagcctcatctttaccagggattacacctttataaaacttcatggcagaaattttacaaaatagaattctcatacgcatttctcctaattatttcgcagcttccacacaactgtcactgtatcgctggccctaatatcttcaggttctaactgcaagggttcatctgacatatagcaagtatcttcttccaaacttaatggcatagcatccttaatctcccatatggtgaagtagtaagctttaactctccccatgaataatctatagacacaagctcatccagtttcatttcagctgctttagcaagaacctctgctttcactcttgaatcctttacagccttttcaagtaatttatttttcaatacatgactatacttatatcctttaaagactcgtttgtattcg

SEQ ID NO: 3154 - DNA, 8819 bp, Unknown
  gut microbiota DNA sequence
caacacaaggaacttcatcactttataaatgtaagggtatgggtaacggggaaaggatatggaccacataattttgattatgtggtttttttgaaccataacattggttcgctgtccatggaaccaatgttagttttataaattataaattgtcaaactacatgaaagaatatccataaatcgacaaaaataccattttattacaaagtgaaacggttttgtaacgattttgaaagcaattgagtggtatatccttacaaagaacagtggtatgcgacttggaataacgggagaaataacgctgatggcagaaacggggaatgtaactatatttataaagacctttgatggatttgatgtttatgtaaacggtaaaatggtttattttcccagcagcaaagcgaaagagatgcttgcaattatggtcgaaaaacgcggaagcagcgtttcattatcccagatgacatatctgttatatgaaaacattaaagagagcacggcgaaaaacaacttaagggttgtattttaccgccttcggatgagcctgatggaatatggaatagaacaaatattaataaagaaacgaggcagctacgcggtggatacggagcagtttgtctgcgatttctatgaatttatcaagggaaatccagagtttatatccctgttttccggaagttatatgcctgaatatttctgggccgaggacatgcttccttatttaaaaaacctgtatagaaaatataacggggtgatgatatgacgggaatcattgatatgcatgcacatattctcccgggaattgacgatgggtccagggactgggatgagagcagaaggatgctggaggaatcttacaggcagggaatccgatatattgtggcaacgccccattattccaggagtggtttgccttccggtatatatgagctggcagaacgtttgaaggaggaggcacacaacattgcaccggattttatgacgggtctggggcaggagacctattatcatgagggcttggtggaccatctcagggagggaaaggcccttaccctggagggcagccaatatgtgctggtggaatttgatccccaggtatcctatgaaaagatgtaccaggcaatcaggaaactgaccatggccagatacataccggtcatagcccatgtagaacggtatacgtgccttaggcaagggaccaacctgtcagagatagcccaatgtgactgcaggctgcagatgaattacagcagcctcagtgggaaccatttatgggataaggaaacccgctggtgcaggaagcaggttacggagggcagaatcttttgtctgggaactgatatgcaccgcatggactacagaaaaccggacatagaggagagcttttgctggcttgtgaaacatctggatgggcgcagactccacagcctgctgcggggaaatgcgaagaaaataatacagaaacgaaatacaattaaaaaacaggagaacaggacgaggtatggaaaagacgtatgatgacaacgagattgagatagacctcttggaattgctaggtgagttccggcgcaggatatggatgatattgggaattattatattgtttggaggcgtggcaggagcattcagcgcctttgtgctcactccccagtataagtccactgcaatggtttatatcctctcaaaagaaaccacattgacatcactggctgatctgcagataggaagccagctgaccaaggactataaaattatcgttacaagcagaagagtcctgaaccaggtcatcgaagagatggagctggaccttacatataaagacttagtagagaaggtgacaattgacaatccccaggacacacggattctttctatttccgtggaggatccggatccatccatggcaaaattaatcgcagacaagattgcaaccacatcctccgactatatcggggatatcatggagatggttcctcctaaactgattgaggagggggaaattcccatactcaggtcaagtccaagcaatgtgaaaaatgcactgataggcagtctgctgggagccgtactggtctgcggagccatcaccgtgaatgtggttatgaatgacaccatccggacagaggaagatgttgcaaaataccttggattatctgtcctggcatcggtgccggagcgtgaaggagaaaagccagaggataaggaggccatgatatcctcaaaatcaaggaataagacggcatcagggaaatccagaaaaaagaaaaggggaggccaggcgtcatgagacaatttgttgcactaaacagggagatgaaggatgactaccattacaatgaagccattaaaacattgaggaccaatatacagttctgcggaagcggcatcaagacaatcatgctgaccagttccctgcctgacgagggaaaaagcgacataacatttgccatggcgtcgtctctagctcaaatcggtaagaaggtagtgatgattgacgccgatatacgaaaatccgtactggtttcccgttatcagctggaacgggaggtggcgggactgtcccaatacttaagcggacagcggtcaatggagcatgtcctttatgacacgaatatagaaaatctcagtatcatattcgcaggaccgtattcgccaaatccggcagagcttttagaggaaagcctgtttggagatatgatttgtaaattaaggcaattgtacgattacgttattattgacacgcctcccatggctaatctgatagacggagcaatcgtggcccgtcagtgcgacggggctgtgatggtggtggagagcggctccataagctaccgtctggagcagcgggtcaagggacagctggaaaaaagcggatgccgtattctcggggttgtcctcaataaggtgagcatggagcgaaacggttattacagcaggtactatggacgttacggcaaatacggaaagtattccaaatatggccattacagcaagtatggcagatatgagaaggcagaggcatgagctggcttcgtaaccataaacacacagtataccgggcggctgtgggggcagcggcaatttcgctgatctgcttcatatgggccggggtgaatctgtaccgcaataggaaactcctagaaactgagattgcagccagggattatgtggggcggggaggaagccaagggaacagccagggaagcagccaggggaacaaccagggaagcagccagggggacagccagggaagcagccagggggacagccagggaagcagccagggggacagccaggaaagcagccgggactgcgggcagtgggacacatacctctttggcggggatgtggttgaatatagtggaaaacggtacaggcgcagcagttatgtgaaggctatcctgtgtattggagtggaccggtcgggagaaatgacagagaaaaccaccaccggttttggtgggcaggcggacggggtatttctgattgcccaggatacggccaggaataccataaagatattgatgataccgcgtgacacgatgacagatatcacgcttactgatttgagcgggaatgaactggggaaggacatgcagcacctgacgctggcttacgcctatggtgatgggagagagaagagctgtcaatatatggtggatgcagtgtcagaactattggggggcctgaagatagagtggtatctggcagccgatacaagtgttatccctgtgctgaatgatgaagtagggggagttacggtaacgattgagacagatggaatggagaatcgggaccctgctctggtaaagggtgaaacagtgacgttgaaagggaaacaggcagaagtatttgtccgttaccgggatgtgaatgtggaccattcggctttgtatcgtatggaccagcagcaacaatatataaaggggtttttccaggcggtccagaggcattcggccaaggacagcggccttgtggtcaggctgtttgagaggattcaggattacatggtcactaacatgaccaaggaccagtatcttaaagttgctatggacgctgtcacaggcggaaaactgggcgatgaggatttttatacagtacccggggaaggtgtggtgacactccgctttgacgaattttatgcggacagggaagcactgatccctattttactggagttgttctaccgggaaattgaatagacagggatgaaggaccacagtatttgccgttggaaggaagaagaacggtatctggcggtgaatgtgtgcaaacatgcaatatccagcatgaaaccatgctgtttattgaatataactactcttaggagagaaaggagaggtgaaggatatgaaaaagaaatgcatagcagctttagtgctgacggttgctctggcatcacagcctgtatgggcatttgcagccaacagtcctaccagcaatggctccattggttcatccagcagcagtgatggcagcggttctataggatcgtccagcagcaacaaaggcactacaagcacaaattccaacaccacggtaactgtgtcagctacaggtgtcaaaacgacaggcgccacaaccagtgccagccagaccggcagcacgattggcgttgcggtggacactgtaacaaccacagggcagcaggtaacaaccaattccaagggagaggctgttatcggtgacaccgctgttgcatttgcagacagcacagcagcaactgcaggacttccatcggatgtggtatcggctattaatgatatcaatgcgggaaaaccgttaaacgaggttgttcagggcgtggacttgacaggctttaatgccctgacaggaacccatgcaatcatcacaaaggatgctaatacaggcactgttaagacaggtcccgtagaggtttctctgtatgtgcccaacctggttgcgaatgtcaataacgtacagttattgttctatgacaatgccacaggccagtggcagctgattccggctgttaaggtggatccggtgactaagacagtggctgtgaatgttccgggatcggggacgttatcggtagtgtataagtagtactaacatttttgcggtaacgggaggaataaatattttgtttcctcccggttccgcatgtggataagggtgagggagtagtatgatacttgataggtaccttcctaaaaacaagtggataagagctgtattatttttgctttttgatatctgtatgacaggagtttgcgcatttttttctctgtgggtacggtttgacatgtcagtggcatccgttcccaaacaatacgcagaagctgcaaggttatttttaccatacattagtgtgagctgtattatgaccttttttgcatataaaatgtattctactatgtggggaggagctggagttcgtgaaatgtttcaggtattcagcgcatgtttaacggcagcagtagttcagttggctatatctcaattgctaagtgttcggcttccacgtagtttctatttattatggtttgtatttatgactgtttttgttggagggagtcgtataagttatagggcggtaaaggcatgtctctgtcatatgaactccagaaaaagatatccacgcaggaagcgcgtcatgattgttggtggagggcaggcaggaacacttttgattaaagaattgaaaagcagcgataaatcgaaagcggaaccagtctgtattatagatgatgatagggcaaaaatagggaaatatataaatggtgtcccaataaaaggaaatagcagagatatcccgcaagttgctgatagtatggcaattgatgaaatatatattgcaatgccggctgcttcggtggctgaccgaaaacgggtgttggaagcctgtcaaaaaactggaatacaaatgaagatactcccgggtatttaccagttagcaaatggtgatgtcagtgtaaccagacttcggaatgtaagaattgaagacttactgggaagggagcctgtccaggttagtttagatgagattatggattatgttcagggaaaggttgttttggtgactggaggaggaggttccattggaagtgagctgtgcagacagcttgccagtcacggtgtaaaacaactaattatttttgatatgtatgaaaataatgcatacgacatccagcaggaactaatccgaaattatccatatttggatctagtggttttaattggttcggtacgaaatacaaaccgtctggattctgtatttcgtacctatcatccggatattgtgtatcatgcagctgcgcataaacatgttccgctgatggaagaaagtcctaatgagtcaatcaaaaataatgttgtaggtacatataagactgcaaaagcagccataaaatatgggacggaacgatttattttgatatccacagacaaggcagttaatcctacaaatattatgggggcaagtaaacgtatatgcgaaatgattatacagatgtgcaaccagaaaggcagtactatttttgcagcagtaaggtttggaaatgtacttgggagtaatggaagtgttattcctcttttcaaaaaacagatagaggagggtggaccggtaaccgtaactcataaagatatcatccgttactttatgacaattcctgaagcagtaagtttggtcttacaggcaggagcatatgctaaaggtggagaaatcttcatactaaatatgggagaaccggttaaaattctcgatatggcggaaaagcttattcggctttctgggtatgagccatataaagatattgaaattgtttttattggtctgagaccaggagagaaattgtatgaagagcttttaatgaatgaggagggaatccttagcacaagaaataatcggatttttataggcaagccaattgaaatggattatgagatattcgaagagaggataaatgaactggatgaagctgtttgggaggaaatcgcggatgttaggaagttagtgcgtaagatagttccaggatacaaatattaggattattttatgttaaaaacaggaatataggtgaatttcgggtgtttattttagggagataaaacccaaaaagagggtgacagaaatggcattaagatttatgtatattacgaataatgtggaaatagcgcatatagcggaacaagctggtacggaccgtatttggattgatcttgagagaagaggtaaagaagaacgacaaaggaatatgaatacgcaaaagtccatgcatgttcccgaagatataagtcgattgaagaatgtattgactaagtcggaaattttagttcgaataaatccattgtatagtgaatcgaaaaaggaaatagatgatgtaattcgccgaggagcagatataataatgcttccgatgtttacaaatgaatacgaggttgagaaatttgtagatatagtgaatggaaggcgcaaggtaatgcttctgttggaaaccagagaggctgttaaccgattagatgcgatattggcggtttctggtatagatgaaattcacatagggttgaatgatcttcatttatcctatgggatgaagtttatgtttgagcctctggcaaatgattgtgttgatagcatctgtactttgattgaaaggaggaatataccgtacggatttggggggattgcaacattagatggaggattattaccagccaaaataattctgggagaacattatcgtttgaaatcaaggatggtgatattatcgcggagtttttgtgattcaacaaaggtaaatgatatggatactttggcgaatacttttgtgacagaagttaaacgattgagggaatatgaagtatggttgtcaaagcaaacgttagatttttatgacaaaaatcataaacaattgcaggaaaaggtaaaaaccatattgatgaaattaaaatgaaataattaaggtgggacatgtataaaaattatgcaaagcgaaagcttgattgttgtattgcctttatagttttgattatcggattagctccaatgttaataatcgcgtttgcgattaaaatagattcacatggacctgttttatttaaacaagatagaataggaaaagatggaaaagtgtttaaaatgttaaaatttcgttctatgtatataggtgctgaaaagaagggaacaggggtatattctggaacaggggatagaagagttacgagagtgggaagattcatgcgtgcaacaagtattgatgaattgccacaatgtataaatatattatgcggtgacatgtcactaattggtccaagacctcctctcacatatcatccatggtgttatgaggaatatgatgatgaccagagacgaatgtttgaggtgcgtcctggcataacgggatgggctcaggtccatggaagaaaaaatgttgaatggaacgaacgaataaaaatgaatgtttggtatgttgatcatatgtcgctattattagatttaaaaatattaatgatgacggtttttaaagtaataagtaatgttgataataaaaatacaaatgagactgtaatgaaaatataaggaaaagtatagattatgaatttattagtcacaggggcctggaaatctgcgttagagtgtatagatgcaattaaatatagagggcactcagttgtatatttacaacatgagcaggatgaagtccctagtaagtatagttgggtcgaaggtgtgatcggtaataggatattccttactcatcctattgaaagatttactcatcttaaatttgttcagttaactggcgcaggatacgaccatattcctatgtcttatattaaaaaaaataatataa

SEQ ID NO: 3155 - DNA, 3237 bp, Unknown
  gut microbiota DNA sequence
ttaaaacctgattattttattaaaaattaaactacataaaatctttatagtatctttatataatacgcaaatagaaacatctttcacaatatgatactatttaaccgcagacctataataagtatagcaccgccgcatattatattttaagacagttgaaatatgatacttattatggagaaactttataaccaataattgacaccggaaaaccagccagacgaaaggaggatcttatggatacaagcaaatctaacaccatcatcagtaaacgggttttatctgtcttgcctctggccagcatcctggtcattgcatttttattgactgaattccatccctttgcatctgattttaagagcttttttacgttctttctttcaggctggtttttgtttacactctatctttcagtaaagggaaaacatctccacgaacgttacatgatatttattctttcacttatagccatcataaatggcttataccgaagagaaatttttgaagcctattttcaaatccccatagaatatggagcttgtatcattatagttttttaccttttacggattagctttccttatattaagaagttatctttatggttcctttcacatacccaggagccccctgatactgatacaaacactccaaacaacggtgcttcaaagatgagatatgccaggcaccgatttgttcaccacacaaaatcagccgctgaagctgattcccaggcgtcttcaaccaacgccaaagtcgtctgtcccaccacacaatatcacaaggggatttcattgggacagtcgctcttatacatagcgttaaccgtcataccctttttatttacttacaatatggtaacccgattatctcaaacaaccaattacagaatcgccaacacggaaacactctttcatgatgttaattcaattatcatagtgtttctcattggtatactgtccatggttgtcgtattcacccttttgttctgctactataaactgataaaaataatggtcactacaatacagggaaatgaaaacccttccgcctatgtactaaccattgccgccctatcagcatttttagctaagaccggtgtattaagccaagatactgtactaaatctctttgcacagggcgatattttttcgctgccactgttaatattgattctttatccggtttgtcttttaagcgtacatgctctcattaatctggcaaagaaccacaatgtaacatcctggattcttgaccgcgctatacagctggcaaagaaggcagcgagtataggaaacaatattttaaactcatctattgatctaattgcatttgcaactgccggttttttatcaagcgctatggaattaattgatgaacaggaaggagacgaggaagaatgaaggtattaacaagtatacgaaagcttttggtgacctgttcccttgctcttgccatggtttccttttatgcaaccgcccagggactccatgaatatgtatttactcaaatgtggcaggcacttctagtatccgcagccatacagactgcactatttatattaaacctgaagctaatatattttttcacattaaaccccagaatcgtcctgattctatgggcaacaatgctgatatcgtcctcgctgttcagctttgtatttatttcaaatgaaatatataacacaagtctctactacagtgacgctgaacgtatcatggatgagttcaccatcaaaaaatgctatcagtaccagaattacctggataattacctgatctacacaaaagaggccatggatgcatactgcagcgttccatttgtcagccattcatcagaaagtaatacagaaatcaccaaaatacttgatgattgcaaaacagatatcagcagtttcactttttcatcaaattgcgcagctttccaccgctctctgctgaaaaatctggacagcattaagagttctctgccttcctcgtatacagagcagcaggccaacgatgccctgactgcactggaaggcgaaaagaataacgcgaagactttaaaaaacaatatgttatcgaatataagaagtaaggaagcagtctggaacaatataaaccttcgtcttagccagtataggaactttaatgaccaggcttttattgatttgcagaatgataataataaacgtgacacagaaatcaactctatgaaagcggaggcaacacagttagattcagtcatatctgcgctgcaaacctgcatcaacaaagtcaccgcccataaaatgaataacacagaaaacacaatggaatcctaccgccatgatcttatggtggaaattaataaggacgcccccgacggagacatccttgacacaatcaccagcgatatgtttaccctgttattaaaagaaggctttaccagcagcagttatgaaatgacaaattacttcagttttaaaaactccctttctgtgagaaaagaaatacttgagtgtcaggataaaactgacgcaatcatccatatgctggataataagagacaggataaaaatgcttttatgttcacctcaaaagcagatgaaaatacggagaagcaaattgaaagctggaaacaactctggtatggtcagactaatgaattgcgtgaacttgtaaaatccctcccgctgcctcaggacttaatcatctacagttcagatgcagagaacggtactgtcaccctcaatccgggcataaacctgccggagccggaccgcacggacgagattgatgacatttctgctcttgagcggagatatcttgccaaccttaatcctctggaaaaggcattaaacctgctccacaccaaatacaataccatggctttattttccgcagctgccgctgcagttctggatatatcaagcgccttaatgggagcctttgtatataccctggaacgcgctttcaaaaacaggaaaacggccccggcaactcctgcggtacttgcttccacggaatgaacagagttgtttatatttattagcctggggctgtgctgaataatacggcaaagttctctgaagccatgggcaccactgaggtattcaattagaattctctctttctcttcataggaatacttgtgtctaaatgccataataaacgccccctcctaagtgacaagctttttttaggctctttgtcaatagttggggtgggatttgttaaaatcccgccccaattctatgaaaagggccctttttat

SEQ ID NO: 3156 - DNA, 82237 bp, Unknown
  gut microbiota DNA sequence
gaaagcataaagtaaaattatatatatttatattttaataagaatgtgttatgattaagagaaacagagggagaacaaaaggaggaaatcagatgctggatttcagggtttacacatttcttgctgtctgtgagtacatgaattatacaagggctgcggaggcgctgcacatcacgcagcccgccgtgtcacagcatatacggtatctggagaacatgtaccaggtgaagctgttcctggcagagggaaagaagatacacctgtccccggcgggagaacgtctgcttcacgcagccaccacccttaagaacgatgaggtattcctgcgaaaacagatgtttgagggggccgggaagggactgagcctgcggtttgggaccaccaggacaatcggggagtcagtgatatccacccccctggcccgctatatccacagccatcccaaggaccgcatcagcgttgtcatcaacaacacggacgagcttctgcacaagctggtttccggggagattcagtttgccctggttgagggatactacgatgacgtggattttgattccatggttttcaggacagagcctttcatacctgtatgtgctgccggccatgtatttgccggggatccggtccagttaagggaccttttagaggaacatctgctcatacgggagcctgggtcgggaaccagggatatcctggagaagaatctggatatcaagaatatccgcctgtctgattttgcccacattacggaaatcggaagtatgcatgtcattctccagctgctggaaaaggatgcgggaatcaccttcctgtaccggaccgcggtggaggaggggataagggagggcgtgttcagggaactggagctgagggatttccagatggaacatgactttgcctttatatggaataagggaagcatatacgcggatacgtacaggaagatctgcagggaactgcagtgaaggaatgatccggccaaaagaaaggcattgccgtaaccccggagggacggacaatgccttatttgttattttaacagactgtcaatctgcgcccagattccatttatctgttccatggagctcagggcttttttcttctgttccaggcactggttcagtttggcgatggcctcgtcatactttccatccttcacatcgttttttgcctgggccttcaacagcctggcctggccgctggcttccgtataggacacctgcacttctgtgatatcatcctttaattccctgacctggttccatgtatccttgtgttcctttaactggccgctgtccttccagccctggcggactgtcttggctgcatcggaggcagtgcggctgctcttctggagatttttgatggaggcagatgtgtcggccagttcctggcggacctgggctgtttcggtgttatactccttttttgtctgggctgcaaaggcagggaagctcatggagcaggccagggctgcagcgcatataaagactgttatttttttcatgaatgaaaactcctttctgtggctgtgaatgtcagtccggaatatgtccgggataatacggaacagcggtaccggtatccgccgtccacaccaacaggatagcacagatgcacagggcggatacaggttaaaaatgcggcaaaaatgtggcagcggtttacggattcctgacgggatggtatgctatccgtaaatactgttacatgcagggaggttattatggcgaaacgcatatatgtggcggatgatgaactgcatatccgcactttgatacagacattccttgtcaacgagggatatgaggtggagacatttgaggatggaaagagcctgtttgaggcattccatacatcctgtccggacctgatcattctggatatcatgatgcctggaatggacggctttgccctgtgtacggcgatccgcagggagagccgggttcccattatcatcgtgtcagccaaggacgctcccatggaccgggtcacgggcatcacccttggcagcgatgactatatggttaagccctttcttcctctggagctggtagccagggtcaaggcgctgtttcgcagggccggatacatccggcaggatgcaggggagacgctggtctgcgctaatttaagcctggacccgcgctcccgctgcatgaccgtggacggcgcccacttttccgtgacacccacggaatttgctttcctgcagtatctgatggagcgcaggggggaggcggtctccaagcaggtgcttttgaaggaagtgtgggagctgccggattacgatttggataccagggtggcggatgatctggtaaaacgcctcaggcgcaaattcagggaggccgggtgcagggcagccattgaaaccgtatggggctatggattcaggctggaggaagacaggggggagagatcatgatgtctgccattcgttcacgcatctttgttcctgtggtaatcctgattgtgctgtttcctgtcctttcctgggcactgttttcctctgcctcaggctggtacgtaaagcggatatccagccagagcttagagcatctgatggaatccgtccagtccatggcggagcaggtgtatccgcgggatggaaacgaaactctgaccagggatgaggagaagatgtattccagggaatttctgagccaggtcagggagtatatacgaaagggacgcccggaagccagtctcattgcctttaattcccggctgaagcttacctttcccaggcagggggaggaggaatgggaaggagaggaaatcagcggggcgtgccgtgagatgattgccggcgggatgtttgaggaaaataaaggggcggatgtcacggctgctgtgggaaagcggcagtacatgttccggctctatgagacagagagctccggcaatataaggggaaaatatctggtgggatatgtggagatacccgacacaaaagcccttctgtcctacacgggagggcttcttgctgccattgccggtgttctggcatttctgtccctggttgctgcctggtttgtggcaggcagcatatccgggcagcttaaggggctgtgcaggcaggccggcgccataggcaaaggggaatttgagccgtcccgggttcattatccgatctcggaaatagaagatttaaagaatgcaatgaacggcatggcggcagagctggaccggaccgaacaaaaacagctggcctttttccagaatgcatcccatgagcttcggaccccgcttatgtccatctgcggttatacccagggaattcagtgcaatgtgttcccggaccatgcccaggcagccgctgtgattctgtctgaaactatgaggatgaaggagctggtggacggcatactgaccatatccaggctggacagccatgacacaaggctgcgcacagaggtcataagccttggggagtttatagaggagcagattgacattttacaggggttagggatagcggagaaggtgagcattgggatggaaaaggagcaggaggatatcagggtcagtgcagacccgtccctgcttggaaaagcgtttcagaatgtgatgaacaactgcgccagatatgcaaaaagcagtgtcacagtctctcttaaaagggagggggaatgggctgttgtctgtgtaaaggacgatgggcccggcctggatgaaaaagagattccccatctgtttgagcggttttataagggcaataaagggaattttggaatcgggctttccatcacgcgcgctgccatggagtacatgggaggacgggtccaagcccgcaacaggcgtccgccctgtcatggagccgagttccggctgatgctgcctgtggaggaagcggctggcaggaaggggtagcaggcgcttatgcggaccagaggcaggcatcggcaggcgcttatgcggaccagaggcaggcggcagccggcgtttacctgcaaaccagaggcagcatgacggataccgtgaatacgtcgttattgtggctgattttcatgtcgccgttatatttatggatgaccgtggatacgttggacagccctatgccgcagtactgctctccaatcttgatgctttcgtaccggttgccttctatgcgcagctggccattgtaggaattggagatgctgatgatcaggaatgccttctggcagcggatttccgtgtggatgaaccggttggccccctttcccatacggcagcatgcctccagggcattgtccaggagattgcccaggatgatgcacaggtccacgttctcaaacggcagttcaggaggcaccatgatgttggctgtcaggggaacgcagcaggcagcggcctgctgctgggcattgttgaccaggatgttgaccatgctgtttccgccggttaggggcaccttcatgccgttggcggattcatagatttgttcaatgtatgtaagggcctcctcatactggcctgcttttaaaaacaccaccagggaatggaggtgtttttttaaatcgtggcgcagggaggtgatttccctctgggagtcctccaccttctgatagtaggaggactgcatggtaaggagtttgtccgcaatcatatttttctggctttcctcgttgataatggcataatcgtccaccagatagaacaggaacatggaggagcagaaaaggattcccgatatctccaggtaaaagtgggatacgctgttcctcatgtggaaaatctggatggtaatgaacaggatcacggaggggaccaggaaggaaatggcattgtaaagggtggctttgttgctctttctcatgtttctgcacaggatgaacaagagggtgaagaagaaaaaaaggatgcaggccgtcatctgggccagggggctctgaatcaggaaattgggctctgagggaaggggctcgttgtgcagaaaacgcaacagcactgcggacagcagcttgcaggcatagttgaggacaacgaacagataagcaaccagcaccttggtcctgagggaatccgtaaagaatatgcagcttaccagcattgtgaaggcgcagtaaaaaacgcacatgctgaacagaggcgcgttgaaccagtaggttacccactggaatataaaataaatcaggatgcccaccgtgtactgggacataggccgcaggttccggtgaagaaagttgctgcacagccaataaagaatcagggtctcggccacggacagcacaaagctgacccaggcatgctgaatgacgttcatcataggtctgcctccatgcaggctgggaatttcatcatagatttgcctccatatagcttaagaattcctggttcacttccctgcgcttgtgcttgctcatgggaagcacctctttgttgtccatggttacggaatccttgaatatattataaatatggcttacgttgaccaggaagctcttgtgaatccggatgaagccgtccgggcggagctgctcttccagggaactgatggtgcctgtaaatgtaaatgtgccttcctttgcaaccacacggatggtccttaaatccgattccagataatagatatggtcggtcatcagtttggtggtgccgcttatgctgggaaaggaaaagatggatgcctgttttttctgctgcctgtcaagcagctcctccacggcggacagaaagtcgccgctctccaccggctttacgatatagcggaaggcgcccaccttgtagccctccaccgcgtaatccacagtggctgtcacaatgaggatgggaacctcgtcgtccagctggcggatgtgctttgccacctcgatgccgcccatggtttccatgcgcatgtctaacaccaggatgtcgcagaaccctttttgtttataatccttaagcaggtccaggccgtctgtgtaggatatgatatccacaggccgtttttcttttaattgttccagatgtccgcacagcaccatcaggtccgcgggactgtcatcgcaaagtacaattctgaacatgaccattctcccctgaaattagttaaacgcataacgattatacaattctttcagtggtattgtaaataggctttttggacaaaaaatacatttctgaccaattattacactgaaattatcgtttgtgcacaaagtattgcgttaattttttccttgtgtaaaatgaggatatgagttgggaaacaatataaaaaacaagaaaaagggggaaacagatcttatgtctggaccaagtggaaatgatgcaggcggaatgaaaaagaccctgtccatatggaatttctttaccattggattcggggccatcatcggtactggctgggtgctgctggtaggtgactggatggtgattggaggcggacccatagcggccatgattgcatttgccataggagccgtgttcctgcttcccataggagccgtgttcggggagctgacagcggccatccctatctccggcggaatcattgaatatgtggacaggacctacgggcgcaatgtctcatacataacaggatggttcctggcgctgggcaacggtatcctctgcccatgggaggccatcgccatctccacattagtatccgatatgttcgggggcctgttcccggttctcagggcggttaagctctataccatcatgggggcggatgtgtacctgttccccactgtcatagcgctgggatttgcagtctatgtgattctccttaacttccggggcgccagcgcagccgctaagctgcaggcatttctgacaaaggccctattggcgggcatgctcctggcaatggcaatctccttcgtgaaaggcgggccgtccaacatccttccctcctttacacaggtggagggaccgtccacggtaaccagcgcaaacaacatgtttgcaggcattatctcggtgctggtaatgaccccgttcttctacgcagggtttgataccataccgcagcaggccgaggaagcagcggaaggcctggactggaacaagttcggcaaggttatcagcatggcgctcctggcggctggcggtttctatatgatttgtatttattccttcggcaccatcataccgtggactgattttataaagagcacggttccggcattggcctgtcttaagaacatcaacatgtttctgtatgtggcaatgctgataatcgccacattaggccccatgggccccatgaattccttctacggagctaccagccgcatcatgctggccatgggacgtaaaggacagctcccggacagctttgcggttctggatgaaaaaagcggggcgccgaagatggccaacacagtgctggcagtcctgaccattatgggtcctttcctgggtaaaaacatgctggtatccctgaccaatgtgtcggcgctggcattcatcttctcctgcaccatggtaagctttgcctgccttaagatgcgctatacggagcctgaccttccaaggccttacaaggttcccggcggaaaagcaggcatctgcatggcttgtctggcaggtaccatcatcatcgggcttatggtggttcccttcagccccgcagcccttaagcctgtagagtgggccatcgtggttgcatggctggtcatcgggctgggccttagcgctgttaccagggcaaaggcaaataataaggcggcagccgctgcaaaataacggcaataaaatcatacatcaacatatatcaaataaaggaggatttttcaatgaagaaggtagcttttaaaggcggtttactgattgacggtaccggcgcggagccagtggtgaacagtctggtgctgacagaggatgacaagattgcgtacgctggtgcggacaaggaaatcggacctgactacgaggttgtggatattaccggaaagactattatgcctggtcttattgactcccatctgcatttttcaggaaacctgacagacgatgacagcgactgggtactggaggatgtggtacagaagacagtggtggcggtacagcaggcccatgagtgtctggagaacggccttaccacggttggcgagatttcccgttccggcatccaaatccgcaacatggtggaagccggcgtcatgaagggccccagggtagtggcaaccggacttggattctgccgtacctgcggacacggggattcccacaagctacccagctactacaacgacgaatcccatccatgggctgagcgtgtggacggaccatgggatctgcgcaaggcagttagaagaagactccgccagaatccggatgcaattaaaatctggtccacaggcggcggcatctggcgctgggaccagaagctggaccagcactatacgctggaggagattcaggctgttgtggatgagtgcaggatggtaggcatcccggtatggtcccatgcagagggctacggcggcgccctggattctgccagggcaggggtacatctcattatccacggccagaccttaaatgacgagtgtctggatatcatggcagagaaaggcatttatttctgtcccaccatccagttcttaaacgaatggttcaagacatacgctccgccatacatcccggaggtgcatgaccagtatcctggcgataccgtagcggagaaggagctgaaccgcgtgtacgctaacttaagaaaagcaaaggcaaaaggcatcggacttaccattggttcggactccttctgctccagccttacaccatacggaacaacggccatcggagagatgtattcctttgtggaaaaagcgggcatcagcgagatggataccattgtggcggctaccaaggcaggcgccgagatgctgaaggtggacaatgtgaccggatccctggcagagggaaagagcgccgacctgttagtaattaacggcaacccgttagagaatatccgtgcaatcgctgttgagaacatggacgtaatcatgaaagaaggatattttgtaaaacgctgaccggtactcccggatgagaggaaagggctgctgctataacaggcggcagccctttgccggtttggaaagccaagggggatggaaagaacatgtatgtattgctgtatcttctgtggattctgttaaacggcagggtcacggctgaaattctggcggtgggagtcccggtggcagggctggtatacggctttgggtatctggccctgggttaccgtttgtccggagacctgcttctcctgaagcgcctgggtcatattcttgtattcctggccatggtggcctgggaggtggtgaaggccaatgtggccattatccgcatagtgctgtccccccacatggaaatcacgccctgtctggtgccggttaagacggatttaaagagcgccggagccagggcggccctggccaatgccattaccctgacgccgggcaccatcacggtggatgtgaaggatgatgtgctgtgggtccacgcgctgacagctgagatggcagaggggcttaaggactggcatgtggcaaggcagctggcgcggatcgaggaagtaagataggaggaagggacatgggggcagagataggggcaaagataggggcagagatgggggcggcagaggggctgtttacaggtatcctgattctgtcggttatcatactcagcatcaatatgatattctgcctgctgcgggccgtactgggaccgcgcttttccgaccggctcattgccatcaatatgataggaaccaagactgttctcatgattgccctgctcataaaggtgttccatgaggattatctggtggatatctgtcttatatatgcccttatcagcttcctgtcctttgtggttctgacagggcttctgggccggcatatgggctgtgaaaaggaaaggggagagagcggtggggcaggaaaggaaaatacaaaaaaggaggcggtgctgtaatgggtctggtgacaggaggaattttcatcgtgctgggagtgtttgtgctctgtgtggcgacctttggcatattccggtttgaatatgcgctgaaccggattcatgtggctgccaaatgcgataccctggggagcatgcttatactggccggccttataatctccaacgggtggaatatggagtcggccaaaatcggattgattcttctgtttatctggattggcaacccggcggcctcccacatggtggccagggcagaggccaggagcaatccaaaccttaaagaggaatgcggggtgtctgaatatgaaggcagttgagatcattctcctgctgtttctgatggcctgttccttaagtgtattcctgtgcaggaacctgttggtggcagccatcctgtttatggccaacagccttatcatgagcatcatatgggtgattctgcagtccccggacctggctatcacagaggcggccgtgggcgcaggggtcacgggaatcctgctttttattacactgtataaggtcgatgggttaaggggggaagacagtgagtgaggacagcggtaagcgcggtctgcgcgcattcgtggactgggtggaaaacggtccggactgggacgatgaggccggtgtgcatgaaggcggggccggcgggcatggcggggagaatggcgggcatggagcagcagacaccgtgtatggagcggcagacaccgtgcacgcttcggggcaggctgtaaagagaaatacaaaacggactatgggcaggcggtttgcggaatttacggaggaacatgccctgcgtgtgttcggccgtgtctaccgggctgtggcgcagatcgtctgtctggcaggcatggcagtgcttctcatgatggtaacccatctgcctgccttcggctccgcggacaatccggccaataatgaggtggtgggccgttatctggaaaaagggctgtccgagaccggggccgtgaatacggttgccggaatcatactagattaccgggcctttgatacctttggcgagtccgtggttttattcctggcggccgtcagtgtcattgccctcttgcgcctcaaaaccgaaagcgggtacagcgggaaggaagaccggagtgggggaacggagcatgaagaggatgaggaaagggatatcatactggaacaggtggccaggctgctggttccctttattcttatgtttggcgtctatgtggtgctcaacggccatctgtcccccggaggcgggttctcaggaggaacggtgatgggggccggcctgatactatatgccaatgcatttgggcaccggcggattcaccgttttttcagctttaaaatctttactgtgatgagcagcagtgcgctgatggtatacgccctttcaaaaggctattccttttttatgggggcaaaccacctggagtcgggtattcctttgggaaggccgggaaacatcttcagcgcaggcctgatactgcctctggatatctgtgtgggtctggtggtggccgggaccatgtattgcttttattccctgttccgggaaggggaggtgtgataatgcaggcgcttgtgaccaactactacgagacagcggccatgattctgttttccattgggtttaccatgctgctgctccagaaaaatctgattaaaaaggccatcgggctgaacattatggatatgtccgtgtatctgttcctggcggccaaggggtacatagccggtggaagggcgcccatagcagatggaaggacatctgtggaaggattcatcaatccccttcccagcggtctggtgctgacgggaatcgtggtgtctgtcagcgtgtcagcctttctcttttcactgattcagagattccaccactattacaagacactggatttggacggcatgctgtatgaaggacaggaggagacagacggtgaggctggttgagaacattccatttttcagtatattcatcatgatggcagggggaatcgtgacgccccttctgggaggcaggaaccgggccagggttctacacctggttttggtgggggcagtggcagtgatgtcaggcctgcttctgggatatacgtcggacggtacctgttttcgcttcatgatgggacatttcccggcgccatgggggaatgaggtcagggccggcgccctggaagctcttatgagcctggtcttttcccttgtgatgtttctcacggtggctgccaataaacggtccctggaacacgacatacccggggagcgggcgggcctgtattatgtgatgatgaaccttctgttcagttctcttctggcccttatctacaccaatgacctttttaccgcttatgtattcatagaaatcaataccatttcagcctgtgccattgtgtgcgcaaaggaaagcggcgagaccgtggcggcagccatacggtatctcatcatgagcctggtgggaagcgggctcatccttatctccattgcccttttatactgccagacaggccatctccttatggaacccatggcaggggctgtcagggagctggcatcctcaggaaaggatttatttccccttaagatggctctggtgatgatgacttccgggctggcagtaaaaagcgccctgtatcccttcagctcctggctgccgggagcccatgccaatgccacggctgcttccagctctgttttgtcgggtctggttctgaagggatacattatcctgcttctcaaagtctatatgcggattctgggaatggatctgattatccggctgcggatcaatgacctgcttttcgtgttcggaatcctggccatggtcattggttcggccaaggcgctgcagcagcatatggtcaagcgggtgattgcctattcatccattgcccagattggatatatcttcatgggaatcggcatgggaaccagtgcagggctggcagccgcagtcctgcacatgattgtccacgcggtgacaaagcccatgctgtttacagccgcaggcggcctcatggactgctgcggccatcagaaggagatagcggcccttaggggaagcgcaaggcggaatccggcagccggagccgggttggtggtaggaagtatggccatgatagggatcccctttttttccgggtttgtttccaagatttcctttgctatggcctcgtttcatgatctggaccggacggttctggtgctgggggccctggctgtcagcacggtcctcaatgccatgtattacataccgctcatcatcatcgtgttttcagaaagagggccggagaaggcggactatgaggcggcaggtctggaggacgcggctgtgcctgaggcgggagagcctgtaaaggatgtttctttcgcggcagccatggcctgttttatggctgggaatgtgctgattgggacttgctacggccctgtggtccggatgatagagacagggcttgccaacttcgggtgaccccggcagcaggggagtatatgagaaggagaggacataggacatgagagaaatgtggatgatggcgccggtgctgtttccagtggtttccggcggggccctgtggatatggaatccgggaaaaaacaaaattcacacagccgcggcggttctgtccctggcagaggctgtgtgttcctggctggtcatcctgaactgcatggggatggagctgcctctgtggagcatcggaccgggcatggagctgtgccttcggatggatggaaccggagccctgttttccggtctggcatcccttatatgggtgctggtggttttctttgcctttgaatatatggaacatgagaaggaagatgcccggtttttcggatgccttattatgtccctgggagccctgacaggagttgcctgggcaggaaattttgttaccctgtacctgttttttgaaatgatgacatttttcagcgttcccctggtattccattccaggaagagggaagcgcttcgtgccggaatggtatatctggcctattccatgctgggcgcatccattgctctgggaggatatttcttcttccgccagtatgcctgcggaacggattttaaggcgggcggggttctgacggaggcagcgggaatggtccagggcaggccgcagattcttcttctggctgttttctgtatggcggccggattttcctgtaaggcaggtcttatgccccttcatccgtggctgcctatcgcgcatccggttgcgcctgcccctgccagcgctgtgttatcaggcctgattaccaaggcaggggtggtggctgtcatccgtgtggtgtacaatatggccggtcccgcgttccttcgggggacatgggtgcagtacgccctgttgtccatggctgtggtgaccatatttaccggttccatgctggcctataaggaaaagaagctgaaaaggcgtctggcctgttcctccttcagccaggtgtcctatgtgctgttgggcgtattcctgctgtccatggaagggctttacggctccctgctccagatggtgttccatgccctggcaaagaacgccctgttcctctgcgcgggggctgtgatatgtaaaacgggctgcaccagggtaaaggagttaagggggatgggaaagcggatgccggctgtgatggtatgctttgccctggcatccctgtcactggtggggattcccccggcaggcggttttctggcaaaatggcatctggccgtgggtgccatgagggcagatgccggcgtgtttgcatggctggggcctgtggtgcttatggtcagcgcccttctgacggcggggtatctgtttcctgttattgtggagggattttttccgggaaaggattggcggaaaacggatcaatcagaagatggaagattgtctgtatctgcatttatgggggtgcctctggccgtgttaggcatctccctgctggtgctgggggccctgggaaatcctgtttttgaattactgaggggcattgcctctgatatggtgtgaaaggggggatgggtgtgaatccatattatctgctggtgcctgtgcttcttcccatggtgactggcgcggctgtgcttggactgcgtccaaaggagcgcagaaaacgggagatactggtaatgggaggaattctggctgcctcggcagtgattggggccctggtgttaaaccgtcccggacagccgctggtgctgtaccgttttggcagcagaatgaatatatcgctgggactggacggtctgtccggggtatttgcctgtctcattgcagtgctttggccccttaccgcactgtattcctttgaatatatgaagcatgaggggaaggaaaacaagtttttcggatatttttccattacatatggggtggtggcgggagtggcgctgtcacacagcctgattaccctgtactttttctatgagcttatgaccctggctaccctgccgctggtcatgcatgccatggataccagggccatctatgcgggcaagaaatatctgcttctttccatggcgggggctgccatggtatttgtcagcattatcagccttcatgaatatggaaccaccctggattttacctggggcggtgtgataccccagggtctgtcccatgtggaacggcgtcatctgtacggcgcatttattctggccttcttcgggtttggggtaaaggcagcagtggtcccgtttcacagctggcttcccgctgcgtcggtggcccccactcccgtatcagcccttctgcacgcagtggcagtggtgaaggggggcgtgtttgcgctgatgcgggtggtgtactggtgcttcggggccggattccttatagggacaaaggtgcaggcagcggttctgtgcgtctgctgcatcaccatcctttatggctccctcagggccctttgcacccagcatctgaaacgcaggctggcctattctactgtaagccagctgtcctatatccttatgggcgtcatgcttatgactcccgcggggctggcagcaggcctgacccatatggtatgccacgccctgatgaagattaccctgttcttctgcgcgggagccatcctgtataaagggggacgggaatatgtgtatgaactgcggggagtgggaagggccatgccggttaccatgacctgttttaccctggccgggctggggctggtgggggtcccgctctttgcgggctttgtgagcaagtttatgcttgggtcggctgccgcagaggcagggggtctgggaatgctgggggtggcatgcctgattatatccgccttttttactttgttttatatggtactcatcataggggccgcctggttcccggcagaggggagggaggattcccattggaatactcattgtgacccaaactggaatatgaagcttcctctgattgccattactgccatgagcatggtcctgggcctgtggtccggccctctgattcaggtgtttaaccggattgcggcaggaggtatgtaggaaggataaaagatgaagggggtagcggaaatggaaggaaatatatggctgttgggggctgtggcctggccttttctggcagcctttatcagtcttttggcaggaaaaaaaggggagaggaaccgggatgtttttgcgtcggccgccatggtcatggaatttacaggcatgctctgcctttatcccgttaacagtccggcagctttttcctgggccggattttgtgagatgggcatatggctgagggcggacggattcaggtggctctacagtaccattgcagcctttatgtggatgatgaccaccctgttttccatggaatattttgcccgacacggcaatcgcggaagatactgtttcttttccctgttaacctgcggggcaaccatgggcgtatttctgtccgacagcctgttctccctgttcctgttctttgagataatgggacttacctcctttgtgatggtcatacaggaggagacagaggcagcgggaagggcagccaggacctacctggccattgcagttataggggggctgtgcgcgctgttcggtatctttatgattgcagcgggaacaggaaatctatccatggacagtctggaacagttcaggaaggccacagggggaacatggcccctgtatctggcaggagcgctgctgcttgccggattcggggcaaaggcagggatgtatccgctgcacgtatggcttcccaatgcccaccctgtggcgccggcgcctgccagcgccctgctgtcaggcatcctgaccaagacgggcgtgttcggaatcctggcagttaccgtgaccatgttccggcatgacatggcctggggaatggtgcttttggtgccgggagccgtgaccatggtgctgggagcaatactggccgtgttctccattgacctaaaacgtaccctggcgtgttcctccatgtcccagattggcttcatccttacgggatgcgccatgcagtgtctgctgggagaggaaaacgggctggctgtgagcggaaccgtgctgcatatggtgaaccactccatgattaagctggtgctgttcatggcggctggatgtatctatatgaatctgcataagctggatctgaatgagattcggggatatggcaggaacaagccgtttttgatgctggtctttgccatgggtgcatatggcatatgcggtatcccgctgtggaacgggtatgtgagtaagacgctgcttcatgagagtatagtggagtatatagaagtgctgggcgcccagggcgccgatgccctgccctttcaggtgctggagtgggccttcctcctggcgggagggcttacggttgcctacatggcaaagctgtttgcggccatttttctggaaaaggccccaatgggccgggagagggatgacagggaaaagcggtacgccggcacggctgcctgctttgccctgggcggctctgcttgtctcctccctcttatggggatggccccccaccggattatggaccgtatggcagatatcagccgtccgtttttaaggggggcacaggtcccgcaccaggtggagtatttttcagaggccaatcttaagggagcctgtatcagcataacgataggaattctggtgtatgtgctgttcatccgcagataccttatggagacaggggaggacgggaccagggtctatgtggacagatggccggcatggctgaacctggaggaccgggtttaccgccccctggtacttgccgtgctgccctttttgggagccgtgctggccagatgcgtcaacgggatctgcgaaggccctcttcccctgtttatgaaaaggccggaaaagaaccaggtggtggcaccgggggagtccagccggtttttcaggcaggcccaggatgtaaggcttctgcacatgatttattccagcatgggatacgggttcatgatgctgggggcagggcttatactgatgacagcatatgtgctgtttttatgagaaaccttgtgtgtgaaaaaaggttgtccctcatatgattaattacctcagggatggtgatactcttcattagaaaacaccatttacgaatcagcgaggtaatgatatgtatagagagaacaaaaatatgaaccaggacgcacaccagaccattctgagaggggatttatattatgcggacctgtcgccggtagtggggtctgagcaggggggaatccggccggtactggtcatccagaatgatgtggggaacaaatacagcccaaccgtaatcgtggcagccatcaccagccgatccaccaaggcagccattcccacccatgtctgtatccgcaggatgcgcggcggtttaaagcaggattccaccgtactggcagaacagattcgcaccatagaccggaaccgtttgaaggaatacataggacatctggattccggtcagatggcgggaattgaacaggccatggttaccagcttggggctggggcatctgacaggcaatatgggacaggtctttctgccgtcttattcataagacggagatatcggttgaggcacaaagaaataataatgacagggccgttttctgcatacattgttatgaggcaggggacggccctgttagtttggacggtcagatgggaccgaaaggtaaaaaagatattgacatatgtcataaactgccctataattattgacataagtcaaaaacaaagtgagacagcggagaaggagaaggcatatggcgcgaccgtacaaagccagaagaatctgttccgtgccagccatagacacctttggtcctttgaaccaggagatggatagtgcggtggagctgacattggaggaatatgagaccatacggctcattgactggctggactgcacccaggaacagtgcgcagaccagatgggggtggccaggaccacggtccaggcagtgtataattcagccaggaaaaagctggcggactgtctggtcaatggaaaaaggctggaaatccggggaggcaactaccagctgtgtccggacggaggaaactgctgcgggaagaactgcgaaaaacgcgggtgccgcagacgccgctgtaataacaaaccaggaggagattgtaatgaagattgctgtaacatatgaaaacggacaggtattccagcattttggccatacagaggagttcaaggtatatgacacagaggataagaaaatcctgtcctctcaggtagtgggaaccggcggaagcggccatgaagctctggctgtatttttgaaaaatttgggagtaaaggtgctgatatgcggaggaatcggcggcggcgccaggacagccctgtcccaggcaggaattgaactgtatccgggcgcgtccggggatgcggaccaggcagtggaggccctgttaaacggcagcctggattatgatccgaataccatgtgcagccatcaccatgagggcggcgagcataactgccatggacacggccacagctgcgggggacataattaataataagaaaaagcaacagaaaaccagaaaaaaccaggcccgcatgaacacggtatataaaacagtgttcatgcgggcctgacatatcttaactgctaagatatcttaaacggtcatgatatcttaacccacctccatatcagattttaccacatctattttcacacatttcttctctaccggcgtgtctgtcagccggatgtgaacttctgctgtttcagcatttcctgagaagctctggggatttgtcttaacccagaaagcagcgcagccgccccttacaggaatggctgaggggccgattacctggattgggccattggtttccacctggatgatgccggggaaatacaccagggtagtggaaacacggtccgtaaccctgcataccacacgggtggcatctgtataatccccataaagcctggtgtcgtcagcagtgacctccatatcgtggaggctggagtcgcgaaggaatttcttttggatgacagccttgcctttgtaatacccggtgatggatccgtcctgccacaaatcctgccacacgccgatttcctcctcgatttcaatgggcggatgttccaggcctatataccggttatccgggtaatagcggaccgggggcttaccgtacatttccacttcgatgtaatcacagttggtaaggaccataaacggggacaccagccggttgcccttattatcacccctggaaaattccgtggtgggctccatcacgatttcctgttccgggttcttctgactgcgcagcacataggcagcgtattttggaatgcggaacatgtccatgacaccgtggtaacagatcttatcgcctgaaccgtaatccgcatgtgtattgtagtcaaaggcgcaccagccgatgattcccagaaggtcctttgacaggttggagtgactgtataccctggcataggccctggcgtgggtggtgcgtttgtccgcactgtcccagagcttggtgggaaatgccgtcccggagaattcggtaatcataaagggcacagggtattccaggcccgtggcctcccggcggcccttgaacagctttgtgccgtccggattgcagtctgagtaggtaaaatcatttaaggagtacacgtcctccaaaagatggctgttggtgatgtagcgcacgcctgtggtgggccgtgaggaatccagcttatgggccagggcgttggccctggtatacagttcgtcgtcatccagggactcattgatatgtatgctccagatgaagatacccgggtggttgtactgggtcagaatcatggactccacatcctgcatcatcacctttttaaattcttccccgcctatgtggccccagcccggtatctctgagaacaccagaagcccaatctcatcgcagcggtccaggaaatactcggactgcatatagtgggaagtgcggaccgtgttggcattgaggtaattcttcaggatgtccgcatccttttcctgtgcccgcctgcccatggcatagcccacataggggaaggactggtggcggttcaggcccattatcttgattttcctgttgttaatgaagaggccctccggtgtgcaggctactgtgcggaaacccgttctcacatggtgcctgtccagcacgcgtccgcccgattcaagggttatatccaccgtgtagaggtaaggggtgtccggatcccacagaatgggggacgggacgcattgtggctctaagataatactgcttttgcccggggtggcctggatgcatcttttgtaggaagccacaatggcgccctctttgtccttcaggcagatatccgctgtcagggagcattcagggccgctgttatccaggaacagttcaggcttcaggatggcatttttgctctccaggtcatagcggattaaggcgcgttccacaaagacctggctgcagcagtaaagccagacatccctgtaaatgccgccgtaggtcatataatcaatggcgtatccaaagggtgggatgtcctcccgctcatggctgtccacccgcagtactatccggtttgggccttccttgcatagaccggtaatgtcaaacatgctttttgagtagccgcccttgtgctcacctgccctctggccattgacaaagagctcaaaataggtcatgacgccgtcaaatacaagtatgattctgttctccagcatccgggaggtgacggagagcagtttcacataggtgcttatcatggctgtctcctggtggctgaagtagcttaaggggagctcctttactgtatggggcaggttcacatctgagcagcggtcagaatcctctgtcagaaggttttcctcaaaatagtcgtaaaatttccagttcaggttccataaaacaggtttgtccataattcatctccttttattctttaacggcgcctgccgtgattccttctatgatgtacttctggaaaaagacatacagaagcacggtgggaagggccaccacgatgattccggcggcaagcaggggccaggaattctgctgtgcgcccgcatagcgcatcaggaaggtggtcagggtcttgttctggtttttgggcatgtacagatagggaatgtacatgtcgtttacaatggacacggtcttgataatgacaagggtggccgtggccggtgtcagcagcggaaagataatctgggcgaatatcctgaaataaccgcagccgtccagcatggcgctttcatccagtgaaactgatatgccgcttataaactgccggtaaatatagagctgcatcaggttggctgcaatgtatatgacgatgggggcgcctaatgtattgtagagccccatgccccggataacctggaatctggcaatctccacgatattggtggggaccatcatggccaggtaaaacaggatatagatgattttcttaaagcggaactcaaagcgttccaggcaataggcagtgattgagcccaccaggacattgaagaaaatgctgacggcaacaatcttgatggtgttggtaaaggccctgacaaggtaccgctccttgaatacgctcaggtagttgttaagggtcatgtccctggctgaaatccacagcggggactgggtgtccaggcttcccggaatcttcagggagcttatgatggtcaccagaaggggcaggaataccatgagaaccaggatgagagaaacagcatatttccctgccagggatatttttttacgcgccatgctgatccctccttctcagacggttggttatgaagcgctgggcaatctgtacacatacaatcatgaatatcatgatgacagccatggaggatgccattccgaagttattgtatttaaaggccgtatcaatggtgtagatggaaaatgtgttggacgccccgtttggcccgccagcggtcatgatgtaaggaatatcaaacatctgcaggctgccgttgataacatcaaagagcatgaagtcaatgacggtacggatggccggaagctggatgtatctcaggcgctgccatgcattggcgccgtctaccacggcagcctccatcatatcctttggcaccgaggaaaggccggccatgaacaggacaatgtgaaagcccatataccgccagatggacacggaggccagcacataattcacgattttggggtcggacagccagttatgaatcaggccttccatacccagcctggtcaggatatagttgaatccgccttccacaggcgagaaaaagtaggaaaaggagtaggagatacccacgccgttgatgataaaagggagaaaaatgatggccttgacaaaaccggaccctttaaacctgctggagagcataactgccagaaccagctccacaggcatcatgattccatgtatgagaagatacgttaaattgttgcggaaagcctgccagaattccggggatttgaaaaagagctgtgtgtaattgccaaaccctgcaagggaccgtaccgaggaaactccgtcccattccaggaagctcatatggatgagatcccagaatggataaaccacaaatacacataacagaatgaccggaactgccagggacaggcttaaaaaggtaagtctttttcggttgagcctgttcatgcctgtcctcctatttaaggcccagtttggttcttgcttccgcccaggtctggttcagctcttcacagcgctttgcataatcaaagccgtctgtcagcatctccacgcccagctgtttgcagtcaaacttggtctcggataccatgttgataaagtcgctgccgccggccccataggtcacgaatttaacctcgggctgaagttcggatgcagtctgaagcacaggatccagctccttggcatagggagtcatggtgctgtcgctgctgatggaggcaatataatccggataccaggcctcgctgaagtagaattctaagaatgctttggctacctcggggttttcagaattgttggtgaccgttaagaagcagtcgccctgggtcacaaggttgaattcatcctggctgctgtcacgaaatggcaggtagaaggtggacataccggcagtgtcgtagccgtcagccttatatgcggtgaggaacatggggctgtttagggtcatggcgccttttttctttgcaaagagagcgcggctctggtcgtatgtgatacccagaggatcttttcccagcacgcccttctggaacaggtcgtaaatcttgccgtaaaccgtgtggatatccgtaccctctgcaaagggcgcgtcctcggttgtcatggcatcccagtaataaccgtttccgctctgtgcggcaggaccatactccatcaggggataagtgggccatgcatcctttgcgcccatgcagattgcgccgaagtcaggggcctggggaccgaaatgttcctggagcttttcgctggcctccacgaactcatcccaggtttcaggaacctcaactcctgcctcatcaaacatgtctgtccagtaatacacataatcacttgccttgcggtccggtatgcccaggaccttgccgtccaccgcatactcagaggcaatctggttatttttattggcttctgtatccgtcaggtctgccaggtactcggagtactggttcatgctgtcggatttatggaacataaggtcgggaagctcagatgcagaggagcggattttcatggaattaaaatactccggttccgcattgaactcttcgatgtcgatttccacatttggatagagcttctggaaccgtccttccatgtccagttcctcaaaggttttggcagccgccacgtcccaggtggccagggtcagggtacaggagatgttcctgtctgccccggcggctttgctggtgtcctcactgccggagtccctgctgccggaatctgcactgccggaatccttacccgtgtctgcctgattctttgcgctgtccgctgcctgggaacctttgggggtgctgctgcagcccgtggctgccagggcagccgtaagagccactgcgcctaacaaaaatcttttctttctcatagcttcctcctttgtgattgcttttgtcagattcagtgtaacaattctgatggatgaaaacaatgaaaaaaggttcgattcactgtacaatggtacggctctgtttccggtaggaggatggactcaccccctcctgggcggaaaatacccgcacgaagtattccacgctgttgtagcccactgcctcgcttatttccttaagcttcatgctggtttcttttagcatggtcttggcgtggtgtatgcgcagatgtttcatatagctggaaaaggacatacccattttgcggctgaaaagcgtgctgaaatatttttcgctgaagcctgcttccgatgccacttcatagagcgtcagatcgggtttatagtagtggctgtcgatataattaatggcccgggatatctcgtccgggaaatcgaactgatagtggaactgtacgtagcgtttcatgtcgctgagaaaatttacggtccatatacacacttcctggctggtctttaggccggatatttcttccagaagactggtgctgtatacatagtccgtatcctccagctggtggaccagggaggcagcaatatgataggccagatagagggccagaaggcctgcctgccggacaggagattcctgtatgcgcgccaaaagaagagagcgggcagactcgaagctcactgtgttattggattttagggcctggatgatttcacggaattcatcctcccgggccattgcctccaggggagaaaagcgggaatagtcaagggaagaaaacaggttctgggatttcatgacgtatttcatggtcaggttcatggtggcttctgctaacttctcctcaaaggcagaaggcccaagggccaggctgctcactgctgcggatgcatccacgttcatgtagttcttccaggcattgagcagacgccggcagacacgcaagaggccttccagggcctggtcctggttgtcctgggggcctgtctcatagaccataaccagattggtcacatggtccggcacgataacgccgtggtttgcaacctgtgaaatctggccggccaggttaagcagggagacatgaaagtttttgtcaaaatcgtttccaaaatttctcctgatttcctgatacctctggattgagaaatagaccatataataccgctcaggaagccctgctgcctccggttcaagctccccgcacagcagctgggccagcagctgtttcctgtctttcacatgttcggcgcctgaagtctgagtcctgcccttttgcgacagaagctgcttcatgttggtcagatgccgtttcagcatttcctcatggatttcccgtttcaggcagtaatcatagattcccagtttaaaggcctggcgaacataggggaaatcattgtatgcgctgagaaccaggatttccggctgggtatggaattcctttacccggcgtatcagctccaggccgtctatcaccggcatctggatatccgtaatcaggatatccaccggatgctgctccagataggccagggcctcacggccgttagatacgcagccagccagtttgagctccatctcatcccagtcaatcatggaactcagcatcatccttacaattgcttcatcatcagctatcaatactgtgtacatggccctcatcctttgctttattcgtcctctgttgtatttgttatgacaggcagggtcagcgtgaccctggtatagactcctggttttgagtcaatagagacaccgtacagggggccgaaattaagcttcaggcgcctgtccgtgttgctcacgccgatggtacggcggtgtgtgggttccgggcggctggcagcctctgcgcagaggagtgattcggggcttttcaaagagcccggagtgtccatgctttccggttttgccatgtattcgggatgtcccggagccagcggatttccaagaatttgctggatggtgtcctgatccatacctttgccgttgtctgtaatctcaaagaccaggcttccttcctgaatggttcctttgacggttatccttcccaggcggtcccccaggttgtcaaaaccgtgggtgatgcagttctcaacaatgggctgcagaatcagcttgggaactttgcagtccagaatcccgggacttaaatttatgtccacctcaaagctgtccatgtagcggaactgcatgatatagatatagctctccaacacagactgttcattcctgactgtatagaagcccccgtcccggtttaacaccgccgcaaggatattctccagagccaccaccatatcctgcatgccggtatagtgggcggagatagccataaattttaaggtattcagcgtgttcatgagaaaatggggattcatctgggactggagggtatggagttcctcctggtatttttccttttccacctgctccttgtcatgaatcagctccttaatctgctccaccatgttgttgaaggtggaaatcatccgggcgatgtcctgctgcctgcacatttccacccgggtgtccaggttgcggtgctctacctgcctcatgccctctgtcagatggcccagcggaatcagcagccggttcatgtaccatttgaaatagaaaatgaacatcagcaccacgcacaggatgaccgccatactgataagtgagaacagggtaaactgcccgaacagggaagtctcattgaccgcgctgaccagataatatccgggttcgggcagcggcagaatcatatagcgtatgccgcggtatgaaatctgctgctgggtgctggcggcaaaatggttatttgaagcatgaggattgccggctgccggctggcctgaggcagccaggtctgctgcggtttgacggattttttcggtgacagcagacggaagccgggtcttctggccggggtcagccacaatgcttccctggctgttgatgagacagatggttcccatccttccgtttttgttatagtttttaatggcatccggtatcttcgaaacccggtacaggacaatgcactcagcttccgtatcctctctgggagcataggcggatatctccagaatttcctgggaagaacggatgcggtaaaaatagtcctcttccaccagggaggtgtggaccagaccgggctgtctgagagccgtctgataccattccttttggcggagttcctccacgctgtagcgcatctcacccttggggatgatggcagtgccgtctttgcggtaaatatggatgtccagaattttatactcaggtgcggccagcatctgatacatggtatatagctgctccatggcctgttcctgtctttgtgtatcataacctgacgcatcctgtatggtggtgcccccgttcatattgaccacccgagacagggccagggctgagccgcgggtctcttctttgtataattccagcactgcctgctgggtcacggtcacggactccgtagcggcgcggtagatgtatcttcccgccaacaaaaacaccatgcctaagataatcatgacggggaagacaatcatacagacatagctgataacaacgtctttgatcaggctgcttttgaatattggtttcatggttttacctcttgtgtgtgctgtttaaataatagcatgccataggagtgcagttcaaggttaattcatttttccgtactggtaaaaatcctccaccatcaagtcaaaatcatccgtgttttctgatatttggcagtgatacaatgaatttgaagaaaataatagattgccggggactgctatgaaaacagaaaaacaacaaggccatataacagacatgacaagaggggattcgcttaaagtaatcatccgttttgcgctgccgctggtggctgcggctgtcatccaacagcttttttcgctgacagatgccatggttctggggattttcagtgggaacaggggactggctgtgctgggagtctgttcatggcctgtgtggttccaggtcagtgtactgactaattttggacaggcttcctgccttctgacagcggtcaggtttggcgcaaaaaatgaaacgaatctgaagaaagcgattggtaatgtttattttgcctcctttctattgggactggttatggtacctgggctgctggggtctgccgggaccctgctgcgtatccagaatacgccgccggaagtatttgacgatgcattgtcctatctgaggatactttatataggaaccgtatttttgctggtatataatacactgtcatccctgttaagggctctgggggacagctatacctcgtttttagcaattacggtttctgcgttggtcaacgttgtcatggatgttatcctggttgcagggtttggaatgggagtaagaggggctgctattgccaccacggcatcccaggttctggcagcgttgatctgcctggtgaagataagccgttatccggtgttccatatcagaaggaaatatctcaggccggatggcctgctgctgaaagagtatataggcatatgtattcccatgatggcccagagcattgtcatcgcggtgggagggacctttgtacagtcccatatcaaccagtatggaaccgtatttgcagcaggtataagcgctgccggaaagatattcagtgtggtggagacgggagccattgctcttgcctctgcaagcgcttcctttgtcagccagaatgtgggggcaaggcagtttgagcggatacgtaccgtggtcaaacaggtatgcggattatctgaagtcacagcagtggtaatagctattgtcctgctgctttttggaagatacattctgtccttttatgttacagatgaggctgttgtatatgcaatgggaaacctgaaggtgtacagtgccggtttactgctcatgtatcccatgtatgctctgaggcagacggttcaggccctgggaaatgtaaggattcctttattggcagctgttttgcagctggttatgagaattctggccgcaagttttctgccaatgctcattggaagctccggcatttattttaccagctttgctgcatgggcggtttccttgattttaataggatttgtctatccggttcaattcaggaagtgcatggaaaacagcagaggaggaggaatctcatgaggattgctactacaggaacagcggatggaaaagggacctttttggtctatcatgggccgtaccgggaaatcattccccggatggcggcatgcggttacaatggggtggaaatgcatattgaggattctgcatgtatattaagggaccagctgtgggaacttttaaaggcttacggtatgcggctgacgtccattggcacgggagccatttatggaaggcggcattataatctggtggacagtgattcatccgtccgccaggcagctatacagcatctgcgccagcatatgattacggcacagccggatcatgggctggttataatcggcctgattacagggagaatgcaggattgtacctgccgggaggaattcttttggaatcttgaggaaagcctgtaccagttggatcaactggcagagtcatatgacgtgcagctgggctttgagctgacaaaccgctatgaacgggagcatctgatccggatagctgatggagtggagtatctgagaaaccatgattataaacgaattcttcttcatctggataccgtacatatgaatattgaggaagcagacataagacagtccattctgggggcaaaaggatatgtaggccatgtccatattgcggataatgacagatggtatccgggacatggccattacctttttttggagacacttcaggcgttaaaggatattggatatgagggcactctggcactggagaccaactgccttccttccgaagaaatttccgccaggaagagtctggagaatctgagggtgatgctgggacaactaaaataggaaattatggttttcggtttcaaagccagaaagtcaaaaatgaccactcggatgtcaaaaatgttggtgtgcaacatgtatataataaggtaaaattatactacaaagttgtaaaaattatatatacaaaacaagaactgggagggggagcattgtgcatttgacggccaagaaagagaaaacaataagaagaattataaattatgtcgtttttatgggacctgcggtactgctgttcgtggtgattggtctgattccttttttctatgaaatatggtattcctttacaaattgggacggtattcatgccaactatcagtttgtgggactgaagaattatattgatgttcttaccaatgatcctaaatattggcatgctatgtggtttaccattaaatttgcattctgcgtcctgatattttccaatgttctgggatttatatgggcctatggactgtcgaaagccattcccttcagaaatgtaatgagggcaggcttttatataccgcgcatcgtgggaggcgtggttctgggattcctgtggagatttattatcacggaactgtttccggtaataggagaggccactggaatcggctggttctcccagagctggttccagacggaagcctcttccttctgggcgatggtaattgtcatgacctggagcatggccggttatatgatgattatttatgtggcgggacttacttccatttcctctgattacgtggaggcagccaccatcgacggtgcaaaatccagtcatgtactccgctatattatcctgccgcttttaatgccctctgtcactcagtgtctgtttctcagtatggtgaattcgctgaaagtgtacgacctgaacatttcactgacaaatggaaacccgttccggctgtcagaggcagttaccatgaatgtgtaccagaccgcattttcgtctaacctgatgggttatggcagcgccaaggcattgctgttggtacttgtgattgccggcgtcagcctgattcaggtggctatcacatccagcaaggaggtggaactgtaatgaaagcaaaaaagacgtttctgaaatatattacggttggcggtctgatgatctgcctggcaattgtgctggtaccattttatatcattatctccaactcatttaaaccgtatgctgagattgcgaaacatatattttccctgcctcatgagtttactacgaggaattattctgaggcatggagaaggctcaattttgctaattcactaaaaaataccgtcatcatttccgtgctatccaatttcggcggagtagtattttccagtatgtgcggttattggattaccaggcatcagaacaggggaaccagatttgtattttttatgctgattgcatttatgtccattccctttcaggcactgatgattccctttgcgaaaattaccagtaagatgcatctgaccaacagtctctttgggctgagcgtatgcttctgggctctgaccgtgccaatcagtacatttatcacatccggggcagtgaagagtgtacccatagagattgaggagtctgcgctgatagatgggtgctcgcctctcaggatgtactggaccattgtatttccgttgattaaggcttccgtctttacttttgcaaccattaatacgctttggttctggaatgactacctgatgacacagcttatgctgtcaaaaaaaacactgcggaccatacagatttccatgcaggcgttgtttaatgaggcgttctttgcatgggatgtggctctggccgcactgacactggcaatcctgcccttgtttatattctttgttattgcgcagaagcaggtgctggagggagcgtccgcaggagcagtaaagggttagaggaaacgtaccagcaaaagctgttacaaaataagcaccatatttatcaacactacattacaaaggaggaaatgactatgaagaaatgtttggcattagtactggcagcggcactggcggcctctgcacttgcaggatgtggttccggaagttcttcaaccgacaccaaagcatcagagacaaaagcggaggaaacaaaagccgcaggggatacggccgctgcaggggaaagcgggacatctgagaaggaaccgggctctgtaaaccttagcattatgctggcactgggacagtggactgataattttgactctgtcattgaggactacaagaaggataatccgcagattggcactattgaatatgaatttcccagttcatccacatattgggacttgctgaagggatatctgtcggcagggaccatgccagatatttttggatgtggtttcggagaacagattggaaactggcatgagtatcttgcggatctaagtgatctggaatcagcaaaggacctgtctgccgaacaggtggctatgtgttctgttgatggaaagacaattcaggtgatgcccatggtaatggagggctggggtattctctacaacatgaaatacttaaaccaggtgggatgggagaagcctccggaaaccatatctgaattggaaaaattgtgtaaggacctgaaggcggcaggaatccagccctttatccatcactatgcggagacatccctgtccctgacaaaccatctgggctccacctggattactgccaaagaggatccgttaggatactttgaagaactgaaatccggtaaggatatgaatttggcagaggacccggaactgaatgccatgctggattactatgacctggttctccagtatggaaacgacgatgccattgctacagataaatggaccggaaggaacgcctttttcctggaggaagcagccatgattgacgatgagggttcttgggaaatcccaaatatcatggatgtgaatcctgacctggcagatcatgtggtacagggaagggtaccgattacagatgatgcttccaaaaacaaacttcagacagcctctatctgtgcggccgtgtacaaggacagcccgcagctggatgaggctaagaagtttttggattacctggtaaagagtgattacactgcatactggcatcaggatgtcatgggcaacataccagggctttcaactgtcccggtatctgaaaacctggcctgcctggggcaggatgtgtttacactgatgcaggatggccttacccatgaaaccatgaccccatggtgtccggacgaggtaaaagacagtattggcgaggtatggtccctgtatgtgggcaagcagattgaccgccctcagttcttcaaacaataccaggaaatatggacaaactacgcagcaaataagtaaaggaatcaattgtatttgaaagagggctctcctgtggaaaaatcttattacaggatggttaccccatggagagcctgatactttttccgtttcctgtcagccggtctctccgcggtttacagggactgctttgtgatgccggacagcatgaggcagtggatgatactggaagttgcgggcatattcggatatacaggtgcatgctatcttcttacggcaggtatctgcatcctgggttcaaccagggcatcggtgctcaatactttggaacctacatataaagatagaaaatcggacagatgatacaaggaggataagataatggcaatttatattgcgcaaaaagaggatttggtatctgaatatgatgacagtggctttgcgaaaaaagaagcgcttccgggtacttatgaaggcggaatcaggaattacaagtgttttctgaaggcaggctgtcaggttgagcctgaaatgtatgaggataagctggtactgttttttttcggaaaaggaacaggatatataacggaccagaaaggggcgtattccattgaagaactgtgtttttatgtgccggaatttaataggactccttacgctgtccatgcaaccggggatatggagtttatgatgtgcgttgtggatatgaatcaatgggactggaaggtttacaatgcctcccacgtccgtctcccctttttccgtacagtgagtaagtgcattaaatacgatcaggactgtaaaggtcctcatacaacgtcatggttcgtgctgaccggtcagcagctgggccgaatcatggtgggggcagtgcgcgctgttggtgaggggactgctgagaagggacatcccgctgtggaacagtggaattactgtgttggagattctgactttgagcttaccgtagacggggaaaccagaccgcacaggtctggtgaatggagctatgtaccggccggtctggaccattctctgatggcggaaccgggcaaggaggtttactatgtatggtttgaacattttaccaaggaaaaggatttcatagtgaagcctcttccggaaaacttctaaggagggtaagaagatggaaaagtattatctggtaaaagccggggatatcccgcaggcttacaatgacagcggatttgccatgagcgaacttctggcaggcacctatgaagggggaatccgaaattataaatgttttctgaaggcgggctgtgaggtctctccggatctctgtaaagaggacacagttcttcttatgttcggcaaaggtacaggctacatctattctaaaaatgatatgcataacatttcagaattatcattctacgcacctgactttgacaaggagccatacaccattcatgccatccaggacatggaatttatcttaagcatagtggagatgaaccaatgggacaaggaactgtttgaagcaagccatgtccgtctgccttttttcctgcaggtcagcgacgcggtgaaatatgatcaggactgcaagggaccccataccacctcctggcatatcttaagccctaagatgctgggccgaatcatggtgggggttgtcagggctgagggagaggggaccacggaaaaaggacaccccaaagtgcatcagtggaattactgcgtgggcaattctgatttcagccttacagtggatgactgccctgccgtaaatcacaggacaggagactggagctttatcccggctggaccggaccatgctttggtggcagagccggggaaggaagtctactatgtatggtacgaacactataccagggaaaaggatttctgtatagctctcgcaaaaggggaagaatttgacggcaaatattagaatttacataaaagattattaaggagggtttcttgtcatgaaaaatgaatatgggaaaaattactatgttgtaaaggcggaccaggtggaaaaacattttgatgacaatggtttttcaaggactgagcttcttccgggggtttatgacggcggaatcagaagctacaagtgctttctgaaagctggctgtaaggtttctccggaactttataaggacaagggtgtggttattttgtttggccagggcaagggggtgctgaaagacaaggagggggagcacgccattacggagctggctttttatgtacctgattttgataaggatacatatgaaatcagggcagaagaggagatggagtttgtcattaatgtgattgagttcaaccagtgggattgggaaggatttcacgcctggcacattggacttccgtatttcaggctgcacagccaatgcgtgccatatgtccaggactgcaagggacccaatacagaagccagaatggtgctgtgtcccaaatggtttggccgcgttttgatgggaaccaccagggcagacggagagggaactgtagagaagggacatcctgccgtacaccagtggaattactgtgttggcaattctgattttaccatgagcgttggttataaagatcagaacaacatggaaaatgtaaaccataaggccggcgactggagttttattccggctggcgctgaccatgatttggtgtcagagcctggcaaggaagtctactatgtatggttcgagcattttacagacgaaaagaagttcgcgaaaccggaaaattaatatatgtgaaggcagggatatgaagcggtatcagtatccctgccttttttctttcctcaatgcagccctgtaatcgccgggggttgtattggtcagcttcttaaactgctttgcgaaatatttctcatccttaaagcctacggcataggcaatatcctgaatcttaagggaaaagtcacttagaagctccctggcgtggcgtatccgtatctggttcaggtacgtaagcatattgacatggaaggtgctggtgaatttacggctcatatagtccttgttgatataaaatagcttggcatattcggactggataaaaggttttgtgtaattgagttccatgtattgggcaatctggagcatgatatcactggtggaacggctttcctttagttcatcgcaaatacagtacagggaggaaaacatggcctgcctcagggcttccctggaaaacagataattctcccccataagttcctcatataccagaggattttccgccggcatataagtaaaggctgggttcttcttcctgattttagaagcccactgctttagcagcccatggaatgtttcaagcacatagtgaatcagatagaggggaatttccctttcgggaagaatctgtgccagccagtccgcggcactgccttcaatctccctcctgtctccgatgagaagggaggaaaaaatttggtcctccagctgatgcagttgttctgtttccggacaaaagcggagtttttccatggagggcagggcggccattgccgtggaggaagacgcaatgtccccgtaaaaacaaaagaacgcatttttagcctgggtataggaatcagagaatctgccgggaaagggatgttcccggctgatacccagatggaaggggtaggctgtgttcataaaaaaggactgggcagcctttataatggatgtggcggtcatgtctccggctcccagcagaaagaacatgatttctccagggtgatccggattggataggataaaaccgtgctgtcccccaaggctgcggcgtacctgcgattcaaaatccttaagaagacaggcaaatcctgcattttgcattggaaagtagctggtatcgtaatatatgattttacatgtgtcgaccgatgaaaaggacgcatcggcctgcaatagttcctcgtaggctgtttccacgcatcttgaatccaacattttataaaggagaacacctgaataaaaggctgaaagggagtgcaccttttcctgcagatggcggtgtctcagattggtttcgtgctcgtccttccagctttggacggccttgcccacagtggatattaaggtggctgattccaatggttttaaaagataatccatacagccttttgtcagcatggtgcgcacatattcaaagtcattgtggccggatacggcaataaccttgatggaaggatgacgtgttgcaatgaaatccatgatatcaatgccgtttttatcttccatcacgatatcggtaatcacgatttcgggaacctcccgggttatgatatctaacgcctccatgccgtttgaggcagtataaatttggtcaatgccaaattcttcccaggggaccaggaggcgtatggcctgaattacatggtgttcgtcatcagaaatcaatactttcatgttataccctcatttgtatgtcatgtatcagttggtttttggttccataatgtcttgtgtgaaatgataagatgaacagtggtgccgcccagttcattggcgtataattccatggagcactcctgcccgaagttcaacagcaggcgcagcagcacattggtcagtccgatattgttggttgcatacaggttttccgcggcattcttaatactgaggtcggcatcctgacaggcaggcttttcgcgggaaccgtcaattgaggacaggcggttgggggtaagcagcttgtgggtgtactcctgcttgagctttatcagtaatttattgattttggccagcttctcaggggaaggcgtacatccattgtccacgatatatacatggagcagtcggtcctccttcagatgggcctgaaccaggatggttcctttctctcgcttgaataagttgccatgtttgaaggaattctcaatcaatggctgcagaatcatttttggcacaatgattttccttactgtttcctctacttcaaaaaatacagacagatggttggtaaaccgcattttctggagttttatatagcggtcaatatgggacagctcttcatttatggtcacaagggtatgcttggtgtccatggagtactgcatcagctgtccgaaggaggaaatgtagtcatactgttcctggtcgtgatgctccagggacttggtggccaggcactgaagggtgttgtatatgaaatgcgggtttatctgggcctccagcatcttaagctcagtggtgcggttgatgatttccagttcatactgccgtatgacaaagttattgattgtatccatcatttcttccagggaacggaaaagaatacctatctcatcttctgacttatatgttacatattcagacaatctggaattcagattctgggtgtgggtgtttatgtgattcaagaaggtggtggcctttttgagtggatttgtgtagtgcaggatggaataaccgttaatcagtatggtaattaacagacagatactgaatgttaaaagcagggttgccagctgattgttggaactttgatagatagtgtgctttggtatggattttaacatataccaatggtaagaatcacctgggagtttctggcagattctcagggcatcaccggatgttttgctgacaaacaggtcgtcatcatctgcagcctgtccgatcaggctctgtatccatggttcagatgtcatggttccgatagcggatggatccgaggcaaagataacatggtaatccgagtcaacaataaaaaactgttcggactggtcatataaaaagttgcacactttttggaaaaattccatggatatgtcaatccgcagctggccaataggagtcataggacttggaagatggtatatgggcagacagaccgtgaataccagctcacctgttccgggagtgtctgcgtattcctcctcctgggacagggatatgtgatttaactggtgaccataactggtttggcggtggggtggcatgatataagcctgaaaagcgggaaccggtgatggactgttcttttcaaggctgttgttcctcaggtatttttgcaggttttttgtagtcagcaggaagcttttgcccgccttataggtggaaaactgaatctgggtcgcttccggggtcatggaatagatgttggtcatataggagaacagcagggaggaattggcggactctgcataggaaaaggcattgccgtccctggaaaacagaagatcctgcaatgtaccgttcagatagattcctttatttgcaacgtcgatgctggtagacagggaatgttctatgttgctggaaacaatctgccatgtgtgctgagtctgttcgatatagctgttctctgcagatttcctcatatcgtacgaaaagaaaaagcagtaaaccagcatgggaaacgtggtggcgatgaccagggtggacagcagcttataaccaatgctctgaaacgtctttttcatatggatatcctctccggatggatttttcttcccttaattatagtaaaaaaagcagaggttgtgtggagacttttccaaatggtcaaaatcatccccctttttgtcaaaattgtgggtgtggaaaggatggaggatttagtaatatgaaggatttatagaataaagcacataatcattcggctgtgtgcttctcctgtgaaaaaccatagtgaaatacaagataaaacacaaagcaggttactcttaaataagtcttgaaaatcatggcgcctgatgttatactttatcagttggcgggattgtaaaaacagcgcagacacctgtcacctgcaatctcattaacagcaataaggccgtgaaaacccggcacttccagggatttcacaacaaacgaccggtgtgttcgagaccttccacacctaaaacaaaactaaaggagacaacagaatatgagacaaaacaacaggaaactgtacggactggcccagggggccatgattgcagccatctatgtggcgcttaccatggtatttgctccaatcagcttcggcccggtccagttcagaatcgcggaggccctttgtatactgccgttctttacgccggcagctgtgcccggactattcgcaggatgcctgctttccaacctgctctgcggggccatgccgctggacgtggtattcggaagcctggccacgttaattggcgcagccggttcatggtatctgagaaagcataaatggtgcgtgtgcattcctccaattatggctaacaccattatcattccatgggtgttaagatatgcctatggttctgaggatatgattcttttggcaatggtgacagtgggtatcggagagattctggcaatcggcgtgctgggcaatgcgctgctgattacacttgagcggtataagaacctggttttcaggcagcaggcagcataatcgctgtcaggagataaggagataaacataggaatcaatcaggagaggagcggaacatggcgcctctcctttttaatgtgcaaaaacgctctggatagagggtgagcaggctcaagccgcggtcaaagcgcatatcctatatcaggtctgtcaaggaggagtgccggggagccggtatttctccatttttcatatagcttttcaggttttttttgatataataaggaagagatatttttgtgcaggaaaatgtatgacaggcacagggaaggattattgattatgtatcagatagattttaataaaccagaacatgtacactttatcgggatcggaggcatcagcatgagcggcctggcggaaatccttttggatgagggattttccatatccggctctgattcccatgagacagctcttacagagcatcttgaaacgaagggagcaagggtatattacggacagagggcggccaatattgagagggagccgggaatcagcgtagtggtgtacacggcagccatccatgaagataacccggagttcagagcggccagggatcaagggcttcccatgctttccagggcagagcttttaggggagctgatgcgcaattacaaagaagccatagctatttcaggaacccatggcaagaccacaaccacgtccatgctcacggatattctcctggcaggcgatctggatcccaccatctccgtgggaggtattttaaaggacataggaggcaacatccgtgtgggcggtcctgatttgtttgtgacagaagcctgtgaatataccaacagtttcctgtccttttatcccaccatggaggttatactgaatgttgaggaggaccatctggacttctttaaggatattgaggacatacgccattccttccgtttgtttgccgagaagcttcccgcaaaaggacttttggtggtgaacagcggaatcgagaaggtggaggaaatcaccaggggacttaggtgcagagtggttaccttcggaaaggatctttccagtacctacacggcccgtaacataacatatgacgggtttgccaggccatcctatgacctggtaatccagggagagacagtgagccgcatcacccttggcgtcacgggagagcacaatgtatataattccctggcagccattgccatcgcactggagctgggggtcggatttgacgccattatgtcggggctgggaagatttactggcacggacagacggtttgagaaaaagggagaggtggcaggtgttacggtcattgacgactatgcccatcacccacaggagataaaggcaaccctggcggcggccaggaattatccccacaggaagctgtggtgtgtgttccagccccatacttataccagaaccagggcgtttctggaccagtttgcggaagctctgtccgctgcagatgaagtggttctggctgatatttatgcagcccgggagacagataccctgggggtcagctcccgggatgtggcggaccggattgagaagctgggcacgaaggcccattatattccgtcctttgacgagattgaaacatttattttggaaaattgtatgaacggcgatttgttgataactatgggggccggagacattgtaaaagtaggagaaaagctgttaggacaatagttatccacattatccacatagttttcaacattttatgtaaagaaactatgtggattttttgattaacataaaaaaatgtcgcacgatttaaaaaatcttggatttatacggtaaaaatggagttttatgaagaacggggacagttatgtccaccatttttccacattatccacattatccacagcaaagagtgtgcaaaaccgcgcctattttcttttggcagtggatgtgttatgatagaatgaagcaaggagtggtagggatgggtggaaatatgaaggatagatggagtgttccggtcacggctgtggccaatgaattcattgatacatatatggctgctgccaacggtgaatatgtgaaggtgtacctctatgtgctgcgtcatcagggggaggatatcaccatagagttgattgcggatgccttaaaccatacggagtcagatgttcgcagagccctctcctattggaagaaggcgggagtgctgactgcctctgaacagggacagccggttcagggtgaaccggtccgcccggagtccggaggccatacctttacccgtgggcaggatgggggacaggcagcggttcctgatttgcgggttgagccgtttcagcgggaaaccgggaccgcagggcgtgcagaggtacggggcatgacaggcatgcgggaaccggccgttgttcaggagccggccgttgtccgggagcgcacagaaaccacgggccaggaggacggctgtattccggtgtattccacggagcaggtaaaccgtctggctcaggacgaggagttttcccagcttctctatattgcccagaagtacatgaataaagtatttactcccagagactgccaggtgtttgcctatctgtatgagggcttatccatgagcagcgagctcttggagtatctggtggaatactgtgtgcagaacggccacatatcggtgcgttacatggagaccgtggccatgagctggcatgagaagggaataaggacagcgctggaggccaaggattacagcgcttcctacaaccgtgattcctttgcggttatgaaggcatttggcatcaataacaggaagccggctgcaccggagcagaagctgatggacaaatggttcagggactatggattttccagggaagtggtattggaagcgtgcagcaggactattacggccatccacaaccccagcttccagtatgcggacaagattttgtcagactggcagaaggccggcgtccggggcctggctgatataaaggacctggacgcaaagcgcacggctgccagggaggagagcggtgaatccagggagaagaggctgcagaagtatgactccggcgtctcgtcagccaggcagggctcaggagccaggaagaattcatccaaccagtttcataatttcaagcagagggatactgactatgatgctctggtcttaaagcaggtaaaggagtgggtggggcagcagccctaatacacataaggagagtgaaccatggcactgagcaattcccagtatgacgcaatcatgagggagtatggaaggcagcagatcgaaaaccaccacaaactggaggagcggcgccaagagatttatgccaggctgccggtagtaaggcagctggaagcggaaatcgcagagcgttccgtggcgtgcgccaaaaagctgctggaaggggataagagtgtcctggacaggctgaaggaagaccttaaggatctgcgggagcagaagtcgcttattatcagggctgcgggctatcctgacgattacctggagcttcattaccgctgtccggactgtagggatacgggactgatagacggccgtaagtgccattgtttccttcaggcccagatgaagctgctccatgcccagtccaatctggaggatgttctggagcgggagaattttaatgccctgagttatgagtactacgatgatacggagatacttccccagctgggtattaccaatgcggcctacatgcgccgggtagtggcgggatgcagggagtttgtccgtgactttgataagaaacatgataatctcctgtttacaggaagcactggtgtgggaaagacatttctcaccaactgtattgcaagggagctgatggatgatttccattctgtcatctatctgacagccagcgatctctttgatgtattttccaggaataaatttgattatgataatgcggaggacatgaaggacatgtaccggtttatcctggactgtgatcttctcatcattgatgatctgggaacggagttaaacaacagctttacttcctcccagctgttttactgcatcaatgagcggatgaacatgagccgttccaccatcatatccaccaacctgaccctggcccggctcagggattcctatacagaccgtgttacatccaggattatgagcggatacaggattatcccattatatggaggagatatcagactgttaaaaaagtaacgtataattagggcatttctggggtacaagggccttgacgaaccatggagaatgatggtataaaagtatatgccggtccgggtaagaaggcctccggcaaaaaacaggaggatgttaaccatgttatatgaggagaaaatcattgaaaccattcccgtgggtccgttgggactgattccgttaaagagctgtacggagttgggcgataaggtgaatgcctatctggtggactggagacgggagagggaaagcgagcacaagtctaccatcgcattttccggatatcagagagattcctacatcatcaatgccgtaacccccaggtttggcacgggagagggcaagggacttgtgacagagtccataaggggcgacgacttatatatcatggtagatatatgcaactacagtctgacctattccctgttcggtatgaccaaccatatgtcaccggacgaccattttcaggatttgaagcgtgtgattgcagcggcagcaggcaaggcccacaggattaatgtgattatgccgtttttatatgagagccgccagcacaggcgttccgggagggaatccctggactgcgccctggcgctcaaggaactggtgaatatgggagtggagaatatcattacctttgatgcccacgaccccagggtccagaacgccattcctttacggggctttgagacagttcagcccatctaccagttcttaaaatatcttttaaagaatgagacagacctgcagattgacagcagccatatgatggtcatcagtccggatgagggcggcacgggaagagccgtgtattttgccaacatgctggggctggacatgggtatgttctataagcgccgcgattacacgaaaatcgtgggcggccgcaaccccatcgtggcccatgagttcctgggagccagcgtggaggggaaggatgtgctcatcatcgacgacatgatttcctctggtgagagtgtcatggatgtggccaaggagctgaagcgcaggaaagccaggaaggtttttgtgtgcgctacgtttggtctgtttacagggggacttacaaagtttgacgagtattatgataagggaatcattgaccggatactgaccacgaacctggtatatcagactccggatcttcttgagagaccttactatattaatgtggatatgagcaaatatattgccctcattatcgacaaccttaatcatgacgcatccctgagcgatttgctgacgcctaccaagcggatcaaccggctgctggctcagtaccgcagttaacaggaacgcaatgtaaagaataaaaggccgttttcctagatctgcctgccggggcatgctgcggcgcttaaggcaggtcatggggcggcctttttggatttctgacatttgtgatgggacagggggaagatgctatatggaagaaaaacagttccgcgacaagatttactggcttacattcctgttcagcctgcttgtggtgtgggtgcactcttttaatggggagctgtttatggggaccccggaggctgcccttaaggttgcagggatagagcgcatactgggagagagactgggacagatagcggtgccgggatttttcatggtgtcctcctatctgttttttcgcggtttttgctgggaaaagctcattccaaagtggcgttccaggataagaagcctggtactgccctatcttttgtggaattttctttactatattgggtatgtggcggccacccgcctgccgggcctgtccggagtggtgggaaagacgcccataccctttaacgggacccagctttttgacgcccttgtgtgctattcctataacccggtgttctggtatctgttccagctgattcttctggtggcgctggcacccctggtttacactgtgatgcggggaaatttaacgggcgccgccgccctgggaatcatggcctttggcctttggaagaactgggccatgccccttcttaatctggatgccctgttttatttctgcgcagctgcctgggcgagccttcacagggatacctggggaaggggaatagaggaaagaactgggggccggaagaatatgacggcaggagccattcttttgactgccatgggacttcttctgtacctgggccgtttcggaggactgttgtgggagcgtccgctttacaccgtatgttggaggctgtggggagtctgcggagctgtcctggctgtaaaggcagcggaccttcctgatgccagggagtggatgaagcataatttcttcctgtatgccattcattttgcctgggtaaggtttatcaacaaggcagccgcggctgcttttccgggaagcgcggtcattgccctggctgcattcatcctgatgcccgtcctcatgacggcggtcagcgccctgattggcggcgctatgagacggttcgtacccaatgtttattatatgctgtcaggaggaaggtaagccggcgcccggcggggaagtcccggccgggcagcgtgtccggaggaaatccttgcaatcagcatgattctatgatattctgatactacttccacggcatttcttgccgtgatggctttggcactgcgtttttgtgcgcaggcgttggggtgcgtgcacaggcacctgtaaggggcgtttcgcccggaattcacattgtatgacagacaggaaaacagtatggaagcagtatggcagcggtatggaagcagtatggcagatgtatgaaagcagtatgaaagaagcagggaggtactgtggaaaccatccggcagcggcgcaggatagcgttatggccgtcatatgaaaccagcgtaaaaaaggggcgtggcgggaaaatagaggttgacattttaggggaactatactattattgtaactattagagaacatttgttcgcatggaaggcattggaggatactatggccagagaagagaagagtaatgtaatcaaccgcgatatgaataaagacgagaagttaaaggcattagacgctgccctgacccagattgagaaggcatacggaaaaggatccgtcatgaagctgggggattccagagcaaatatgaatattgagacagtgcccaccggctccatcagcctggatatagccctgggattgggcggagttcccaagggcaggattgtagaggtatatggacctgagtcttccggtaagaccacggtcgccctgcacatggtggcagaggtgcagaagcgcgggggcattgcaggcttcattgacgcagagcatgccctggatcctgtatatgccaggaacataggagtggatattgataacctgtatatctcccagccggataacggcgagcaggcactggagattaccgagaccatggtgcgttccggtgccgtggacatcgtgattgtggactccgtggccgctctggttcccaaggctgagattgacggcgagatgggagattcccatgtgggtcttcaggccaggcttatgtcacaggctctgaggaagctgaccgctgttatcagcaagtccaactgtattgtcatcttcatcaaccagctgcgtgagaaggtgggtgtcatgtttggcaatccggagactaccacaggcggacgtgctctgaagttctatgcatccgtgcgcctggatgtccgcaggatagagaccttaaagcagggcggagaggtcacaggaaaccgtgtcagggtaaaggtagtgaagaataagattgcgcctccttttaaggaagctgaattcgatatcatgtttggcaggggcatttccaaggaaggcgatatcctggacctggctgttaaggagaacatcattgagaagagcggcgcctggtttgcctataacggttccaagattggccagggacgtgagaattccaagcagtacctgtctgataaccccgctgtctgcgccgaggtggaggccaaggtaagggcaaagtatgaactgcccggagcagaggaagccatggaggcagccgaggcctttaagacagccgctaaacaggcggaaactaaaacaggggaaactgatgcggatgcccctgaactggtatgatggtcacagctgtcatccctgtagataagagaaagagcaaagtcttcctggaggaaggctttgcctttgttttatacaggggtgaggtggaacggtacaggatagaggaaggcagggagctggaagatgaggtgtatgaggaaatcctcagggatgtactgcggccaaggtccaaggagtatgcccttcatttattaaaggattcaggaaaaacagagaagtggatgaaggaaaaacttgggaaggcaggatatcccagagaggcagtggagtatgctgtaaattttctgaaggaataccgttttctggatgataacgcttatgcccagagctatgtgcgctcctatgcagggaaaaagagccgacgccagatggtatatgagatgcagcaaaagggcgtggattcgtcttatatagaggaagcgctggaccagtcgcctgtggacgaggaggaatcagccaggcaggatctgaccaggcggcttaagggaaaacaggaagcctcctaccaggaaaaaggccgtctggcggcctttttagggaggaaaggatactcttttgaagtgataaacagggtattgagagagattaaaaccgctgaaaaccaggattaggccctgttgtaatttgtctatattgtctgtctctgcgggaaaataaggggaagatacttgacataattctgaaaaaagtataaaattaatatgttgtagttcgtacaatgaaaattaaataaggaggtgctcctgtgtcacagataatggtccccataatgattatcgttatgatagttgtggctattattacttggtttgctgcacgcaattacgagaggaagcagtatgacagcaaggtaggaagtgcagaagaaaaatcaagggaaataatagatgaagcattaaaaaccgcagagacaaagaagcgagaagctctcctggaagccaaggaagaatctttaaagacgaaaaatgagttagagaaggaaaccaaggaaagaagagcggaacttcaacgttatgaaaaacgtgtattaagcaaggaagaaaacgttgaaaaaaaggcagatgcccttgaaaagaaggaggcggacctggtcagaagggaaaacattctcagtaaacgtactgcagaagtggaagcccagtatgagcaggggatacaggaactggagcggatatccggtctaacctccgaacaggcaaaagaatatcttttaaaatctgttgaagaagatgtaaaacatgacacagctaaattaattaaggaacttgaaaacaaggcaaaggaagaagctgacaaaaaggccagggatttagtggtgactgctattcagcggtgcgctgcagaccatgtggctgagacaacggtttctgttgtacagcttcctaacgacgagatgaaaggccgcatcatcggacgagagggacgtaatatccgtacccttgagactcttaccggtgtggaactgattatcgacgataccccggaagcagtagtattgtctggatttgatccaatacgtagagaagttgctagaatagcattggagcgtttgattgtggacggacgtattcatccggccagaatcgaggagatggtagagaaggcacagaaggaagtggagaacaacatgagggaagagggcgaggcagcctgtcttgaagttggcatccacggaattcatccggaattagttaagttacttggtaaaatgaagttcaggaccagctatggccagaatgcattaaagcattctatcgaggtggcccagctgtcaggacttttggcgtcagaacttggagtggatgtacgtttagccaaacgtgccggtttattacatgacattggtaaatccgttgaccatgacatggaaggtacccatgtccagctaggtgcagacctgtgtaagaagtataaggaatctgccactgtgctgaatgcggtggaatcccatcatggcgatgttgaacctaccagcctcatttcctgcattgtacaggcagccgataccatatctgctgcaagacctggtgcaaggcgtgagactctggagacatatacaaacagattgaaacaattagaagatataaccaattcctttaagggagtggacaagtcttttgccattcaggcaggccgcgaggttcgtatcatggtagttccggaacagatcagcgatgacgatatgatattgctggcaagagatgtttccaaacggattgaggacgaactggaatatccgggacagattaaggtaaatgtaattcgtgagtcaagagttacggattacgcgaagtaatcattaagaagtgtagataaatgccctaaaaaccgtaagaatgtagtattcattcatgcggttttagggcatttttttattcgggcgttcaggcccgggatacgcttctggtgaaacgggaatgaaactggtaaaagacagcaatagactggcgggcagccatgaatatgacacacagttgtcatattaactgtgttatcattaggcggaatgttcttgatggcggcagccatgacaaccgtgagcattttcagccattatcctaaaacggaggtaactttgaatgaaatatgaaggtgtatgtattgctgtgaaggatgtgaatctttcaaaaaaattttatcaggatctatttgatctggaggtatttcaagattatggtataaacgtctcatttggcggactgtctttacagcaggaatttgactggctgacaggtgtccctaaagaaagtatattggaaaaggcacacaatatggagctgtattttgaggaggatgattttgacggctttatagatagattaggacagcgcaatgacattcaatacataggtgatggcgtaaaagaagccggatggggacagcgcacagtgcgtttttatgatttggacggccacatcattgaagttggagagaacatgaaaatggttgtgaagcggtttatccattccgggatgtccatggaggagacttccagacgaatggatgtctctgtatctgatttggaaaaactgctgcagagctgaatcaatccctgggggagtgtatcatgccattaagcgtatgcagcccctggtccaaaaagacattcacggaaggaggttctatgaactgggaaccatggacaggctgttataaagccagtgacggatgtacatattgttatttttatgggccttatgcaaaacggtacggtcaaaacatcatagagaagacagacaaatttgattggcctgtcaggaggaatgcaaagggacagtacaacattaaaggaaacaaaattctcgcaacctgctttgcaactgactttttccttcccgaggcagatgaatggcgtaaagaagtttgggccatgatcagggagaggacagatattgattttttgattctgacaaagcgtattgaccgtttccttgtatcgcttccgccggattggggaaccggctatgataatgtgaatattggctgtactgttgaaaaccagaaaatggccgattacagacttcctctattcttatcctatcccataaaacggcgttttattgcctgcgccccgcttttggaggccatcgatctgacgccatatcttcatggagtggaccatgttacagttggcggtgaaacaggacgcgacgcccgggtgtgtgactatgactgggtactggacatccgtgaacaatgtgtaaaagcaaacaaaacattttggtttaaaaatacaggctcatttttcagatgcaatggcgcagtggagaaaatcaatccgtttaagcagaccggcctggcgaaagagcttggaatagatatttcagatggaaaaaggctgttttgacagaaacagccccataaaccagggcatgttcgttaaactgcatttgtatcataaggagggcagggggtaacgcaggatattgtgcgttatcctctgttttgcgttctgccacggagaaaaaaagattgtaccgtactgtgtatcatgctaaaatatatgtggacagagtaggacagaggtcatttgccggtttgacggattcaaagagaggatatggtatgggtagaaggatggtggggctgtacgcagtgtttttggcaagcgcccttatgctggggggctgcggcactgggaataaggttgttaatttcgagattcccaatgagaatgttaccacaatcacttttttcggaaataaatatgagccggaaaacgtgacggttatagaggaaatcctgtcggatttcatgaaggagaatcctggcatccgggtatcctatgaaagccttaagggaaatgaatactatgaagccctgggaaagcgttttgacgcgggaaagggtgacgatgtattcatggtgaaccacgatgttctgctggaaatgcagtccagaggacagcttatggatttatccggccttaaaaccattcaggactacagtgaccgtatgctccggcagatggatgagcatggaaagatttactgggttcccaccactgtgtcaggttttggactttactgtaataagaagctgctgaaggaacataagcagaagctgccggagaaccttcaggagtggaggcaggtatgcagttattttaaggagcagggcattacccctgttattgccaataatgatatatcccttaagaccctggcaattggccggagtttttattcggcgtatcaggaaaaccgggaagatgagatgttcagacacctgaatgaagggaaagaagagctgagtttctgcatgacccccggtttttctctggttaaggagtttattgacaatggctatgtggatgcagggaaagcactggagacccggaaaaactcggatgatttggaggaatttgtaaagggggaatcacctttcatgctgaccggggcatgggcagcaggccgggtggaagggatggaccctgattttgattttgtggtggcgccttatcctgtgctggaggacggcggactggtagtgatcaatgcggataccaggctgagcgtcaatagggccagtgaacatatagatgaagccctggcctttgtggaattttttacgcggtctgaaaacatacagaagtttgcggaccagcagtcttcctttagccccttaagggaggggattccatcgtctgtaaaagagatacagcccattgtctcctgttaccagtccggaaggactgtcatagggacggatgcgcttctggaatttcctatatgggaactgacagccagggcatcagaacgtctgatgaaaggggaagaactggaagataccatgaaatggatggaccaggaggccgctgggagaaggggaggatggtaatggataagaacagtaccagcataaagaagaaggttgccatggcggctgttttggtgggcgctgtgctcagcattctgactttcttattcatccatgaggtgaaggaggagctgtggaagcagtctgtccagaccattatagagagcacccagcagggctgtaataccctgaaggtccagctgatggacgattaccagtccatgggtaccgtcacgctgaacctgagggaaattgcttcggggcagcgggaggaactggaactccttatggataattatgcacagatagaaaacgggatcagtctgtatctgcaggacggagtatgtattccctcaggctcagtaattgacgaaaaggcggaagctgtgctgctggatacggaccggggcaacggcatcattgaccctcatatcagcagcgtaacgggtgtcaatgtatttgacctgtttatgggagtcacactgaaagacggggtgcggggatacctggtaaaggagtatgaggtggattgtattgtagacagcttcaccctgtccttttataacaatgccggcttctcctatgtggtcaaccagaagggggatgtgctgattcgctctccccaccccaacagcaataaaacagtgcagaatctgtttgatatgcttccggagacccaaaacagccgtgagagcctggaccagtttgccaggtctctccaaagttcctataccggatgggccacctttaactaccagggagaggccaccgtattctgttatacgcctttaaagctccaatctgactggtatttgatttccataattccccagagcgtggtaaatgcccagaccaatgagatactcatgcgttcctttaccctgataggctgtatcttactggggattgcactgcttctggtattttatctgcgctatgccaacaggaccaaccggaaattaaagaatcaggccgtttacataagccgtctgtacaatgcggtgccggaaggaatcgccctgatgtccgtggaagccccatacgacttcctgcttatgaaccaggaggggctgagactgttccgctgtcaggagggcgcgtccaatgaagcaatgaagggaaaaagcctccgggatgtgatacaccaggaggactatgaaaatctggtacagttgtttaaggacacagcggacagcggcagaaagaacatctttgaagtgcgtgtgattacattggataatggatttttctgggcagccggaatcgtggagaggaccctggatgaaaacggaaatccggtactgatttccgcttttcatgatatcacggacgaaaagctggcagaggaggcagcggagcgggagaagcttcaggaacgccttaccctggtgggagctatatccaatgcctacccggtgattatcagtctgaatctgaccagggattcgctgaactttatctatgtaaaaccgggcctgatgctggagcttgggaaccaggaatcctacagccagctctatgagtatgtggccgcatccattcatccggagcacctggaggaattttgccgccgcttctcggcagagaatctgaataagactctgggacaggagaaaaatgaggtgtttctggatgtgagacagatgcttggagacggcaggtatcactgggtttctatgcagatcattcatgtggacaatccctattccggggataaactggcaatcctgatttcacgccgtattgatgagcagcgctatgaggaggaacagaaacgcagcgctcttcagagcgccctggacaacgccagggcggccagtgaggctaagagccagttcctgtccaatatgagccatgatatccgcactcctatgaatgcaatcgtgggcatgacggctattgcaagcacccgcctggatgacagggaacgggtgatggaatgcctgaagaaaatcagcctgtccagcaagcatctcttaagcctgattaacgatgtgctggacatgtcgaagattgaaagcgggaaactatccatacgggaggaaccctttaacctggcagaactggtgacggaatccgcggagctggtgcgtccgcaggcagaggccaaacaccttgagatggacgtacatctgaaggggctgaaaaatgaggaagtggtgggagattccctgcgtatccgccagatatatattaatatcctgagcaatgcggccaaatacaccccggaaggggggagcgttcatgtggaggtaaggcaggagcaaggcgccggcagaggatatgggcgttatgtgttccggtgcgctgataccgggatcggcatgagcagtgaatttatgagcaaactgttccagccctttgagcgggcccaggactccacaaacagccgggtaaccggcaccgggctgggaatggctatcacaaagaatttgacagatttgatgaacggtgatatcagagtagaaagcaggccccgggaaggctctgtgtttacggtggctcttccattgcagttccaggatgcagcgcctgaggcggtgcctgaggaatgggtaggcatacactgcctgattgttgatgacgatgagcagacttgtgaaaatgcgtcggagcttttagaggatatgggactgcggccccagtttgtcacaaaaggcgctgaggcggtaagacgggtactggatctgaaggattcagacgatcccttccgcctggtcattgtggactggaagatgccggatatggacggagtggaagtggcgcggcgtatccggcaggaggtgggaagagaaattcccgttatcgtgctgaccgcatatgactggtcggagattgaggcagaggccagggaagccggtgtatctgcatttctggcaaagcccttttaccggtccaaaatctgctatctgctcagcgggctgagcggagaaaaggaaccggtgcaatggagcggttttacgggcaaatcagactttacaggcaaacgggttcttctggtggaggacaatgagatgaaccgtgagattgcgggaaccctgatagaagagatgggggtggaggtggaggaagcctgtgacggggaggaagccctggaacggtttaagcaggtgccggagcactactataacatgatcctgatggatgtgcagatgcctaagatggatgggtatgagtccacaagggccatacgcgccctggacagggaggatgcggcctccgtacccattatagccatgactgccaatgcatttgcggaggatgtgcagaatgcccttcacgccgggatgacagcgcattttgcaaaacccattgacgccagtgtgctggaacagatgctatataaatatttgaggtaaaagaatgagagctgacagcggtttaaacaggctggtgtacgaatattttgaggccaggatactatatggatattataaatatggagagagccttccgtccattaacaaaatttgtcagatgtttcatttggcgcaggcaactgtaagagccggcctggctttgttggaaaaaggaggatatgtaagggtaaatccgagaacagcgcccgtggtggtttataaggccggacccgccgggttccgggaaagtgcagccagatatttcgtatccaggaaagccgggatagcagattgggttctgtccggaaagctgctgtttgagccgctgtggcgggaatgccttatgaggtggagcgatgaggattggaaacgctttttagataatatgaagcacctgtccgtggaatctgtatccatgccggcagcgttatatatactggtgttcaaggcgccggacaaccggctgttcctgaatctttactgggagactgtgcgttatataaggtttgcttatctgatggtcagaaaagaccaggcggtattgacggatcaggagctggagggactgtccagggaggaggtcatttcactgctggggcggacctttgagacgttgtacggccgtatcacagcggatttgctgtcttttatagcacaggcacaggatgagttcgatttgggggatatggagcaggttccgttttactggaacatttaccgtaaacgtccccagatgagatatacacttgtgtcccgcattctcagggagatagagagaggggattacccccgcggaacctacctgccatcacttccctgtatggcacagcgttacgaggtatcgtttaataccgtgaggcgcagcctgtccatacttgacagcatggggataaccaggtccctccagggtaagggaaccctggtcctggctgaagcggaaaaggcggatctggcaaatccggaaatcagggaaggcatgaaactgtatcttgacagcctgcagctgatgacgctgaccattaagccggtggtccaatatacgctggagaatgcaccggcggatgcagtggaaaagctgcagtacgatgtccggcagctcgggaagaataggaatagttataagatctttgaggtggtgctgacatttattgcggagaactgcaggctgaatctggtaaaggagtgttacaataagctgagggaactgattgtatgggggtatcccattgcgttgctgcgcctgagggaaagggagtttcatatggaatataatgatatggtggctcaggccggccggtatctggacgagggaaatgcggaggcattttccggcagtgtaaaggagtttatgggacgggaatatcaggaggtcaggatatttctggagagtgcacacacccggcaataaggtcccggaacaggagggtaatatgaagataatccgtaaggtagagcttaaaccggggagctatgaagaggaactgccgggaatctcggcggaattcccttatattgcctcttatgtggagttggacaagtatgcgggaaaacagtctccctggcattggcacaaagaggcggagctgttttacatggagcagggcagcctggaatatgacacgcctcatggaaaggctgtttttacggctggttcagggggctttgtgaattcaaatgtgcttcatatgtccagggcaaaggacggggaggggtcagtcgtctcactccttcatatctttaacccgctgctgatcagcggacagagcggcagtatcattgaccggaaatacgtttcgccccttatgacggcatcccatgtagagataatcgggctgtacccggaccagccgtcccatgtacctgttttagagaccctccggcagtccttccggatatcagaggacgactgcggctacgaaatccgtttgaggtcggtcctgtctgagatatggtgcggccttcttgccatgacagagaccatggagaaaagccccaaatacaacagccggtcaaaccagaagattaagataatgctggcgttcatccacaagcactgcggggataagctgtcggtgaaggagattgcggcatctgccttcatcagtgagcgcgagtgctaccgggtgtttcgggactgcctgaacatgactccggtagagtacgtgaccagcttccgtttacagcgggcatgctggatgctgtctgagggaaacgaacccatcaccagcatatgccatatatgcggcctgggaagcagcagctacttcggcagggtattccgaagcagtatgggatgcagtccgaaagagtatcgtcagaaatggcagaatagtgacacaagatgacagaaattcgatatcttcagggaatatgatacactataatgatagtaggaagaagggatggcgccttcctcccacggtcatgaaaggggctgcatattccgggaggtgttggattgtgataaaactaaatatattgaacatgaatggatttctgcagattgtgaaccagtgcagcggtgcggtcaatgccatttttccggatggaaaacggcgggatctcaacaagtcatacgctgcccagaaggtgttatgggaccaattcagggagaatcaggggagcctggccctgaaactggatttccagaagccggaggattatataagcattgtgtattattatatcagcgagatttaaagcgctgagccaggaagggaaaatgataaaaaaccagccggaacaggctggttttttatttgttctcagaataccgcataggagcgggtatcagagggaaaccctacactataacatcagggatgaaacctgtggtataaaagaataggaggtgcatctttatgaatacatacaggacagtggatctggcaaggatgttcggcattcatgtgaacaccgtacgtctgtatgaaaggtacggcctgattccgaaagcagagaggacgcagagcggctacaggatttttacggagcttcatgtggagcagtttaagctggcaagggcggccttgcgggtggaggttctgcaaaatggactgagaaagcaggcagtaactatcgttaaaacttctgcgtcaggggattttgagacggcattgaagctgacaaaacgttacagtgaccaggtggatcaggaaataaaacatgcagaggaggctgtcaggatatgcaggaggatgcttgcaggcatcaaggaaccgtgttccggaaaagacagggaacagaccatgtatacaagaaaggaagcagccggtatcctgggtgtcaccattgacacgctcaggaattgggaactaaacggcctgttttccgtcaggcggatggccaacggctaccgggtctatacaggggaggatatacagcggctgaccatcatacgctccctccggtgcgccaactattccctttcgtccattctgcggatgctaaacgccttatccagaaatccgtccgccgatatccggaaaattattgatacacccggagaggacgacgatattatcactgcctgtgataagcttctcacttccctggcagaggcaaaagagaatgctgggtatgtggagtcacagattgggaagctgatggagatgaaccgccgggaacagctgtgaaagacagttatagcatataccgatacacagtgaactaggaggcaggaagatgacaaatcgggaagaacagaggaaaggcagggaaacagcagtgaacgcacaagccgcactccgggaaaaggcggtgacagtcacagggctgagcaagtcctattccggaaaaaaggtgattgataacctgaaccttacgatccggccgggccagatatatggactgctgggagctaacggcgcgggaaagagcacggccgtggaatgtatactggggaccagaagggctgattcgggagaagtgcggatactgggaatggacccggtgacagagcgcagacatctgtttgagcaggtgggggtgcagtttcaggaggcaagttatccggaccgcattaaggtgcgggagctctgtgaggagactgcctgcctgtatgagaaaacagcggattacagggatttgctgcggcagtttaagctggaggataaggcggattccatgttaagccagctgtcgggcgggcagaagcagaggctttttattatactggcgctcataccaggtcccaaggtggtgtttttagatgaactgacaacagggctggatacaaaatcccgcagggaggtctggaaatgccttttggaaatgaaggataagggcctttctatatgtcttgtatcccatttcatggatgaggtggaaatgctctgcgatcaaatcggtatcctgagggatggaatgtttgtctttgaaggaaccgtaaaggaggcggtggataacagcccttacagtaacctggaggatgcgtatttgtggtggacacaggaggaagaaaacagatgaaacggttttataccatactgaaaacagaacttaaattatctatcaggggcatggatatgattatctttgccatctgcatgcccctggtggtcatagtcctgctgggaattattttcggcagccggcccgcttatccggaggcaggctatacatttctggaacagtccttcggggcagtttctgccatagcggtctgtgcgggcggtgttatggggcttcctctggtgatttcggaatacaggcagaagaagatacttaagcggtaccaggtaacgccggccagtccggccctccttctggcggtccagacagcggtatataccgtctattccctggcatccctggctctggtctatgctgcggcggtcctttttttcggggcgcgttttccgggctcagcagcagcgtatctggctgtattcctgtttgtgatgctggccatattcagcataggcatgatgataggaggcattgccccggatgtcaggacagccgggatgtgggccagcatactgtattttcccatgctggttctttcgggcgccacccttccgtatgagaccatgccctccggcctgcagaggattgcggatatgatgcccctgacccagggaatcaaacttcttaaggcggtttccctggggctgccggctgagggtatatggaaatcatgtctgtacatggcagtctgctttttggtctgcggcgggattgcgctgcgttattttaagtgggagtaaaaaagggcccctttcaggaaggggccgccttttcggggtatcagattgagcttgatttatagtgggctttgtgtgaaaataggaggcagagtataagtcggagtgagagaaaaggagcggttatgccggaatattccctgcctgtgggcaataaggatttaattaatatcgcaagaagagcttttaatctggttgacccaaggctgattggacacggtgcccgggtctcctatctggtgttccagatgctaaaggaggatggcacctatacaccgtcggagatgagaaacctgctgattctggctgcactccatgacattggcgcatataagaccgaggaaattgacaggatggtggaattcgagacgaaggaagtgtggaatcattccatttacggatatctgttctttcactattttacgccgtttgaatattgggattccgttgtcctgtatcaccatatgccctggaaccggctgagaaaacagaaggatgtgccggagagagtcagggaggcggcccagatcctcaatctggcggaccgggcagacatctatttcggatcatccggttatacaggcggataccagagattcacggagtttttgagaaggcaggaagggctggcctacagccccagagtatcaggacttttcaggcgcctgggaccggaagttctggaccgcctggctgtccagggccaggaatactgtctgccggaggatgtgtccgggcaatttgacaggaccatggaagaggttccgtttaccgaggatgagcaaaaggcgcttctgcgcatgctgacctatgtcattgacttcagaagctcccataccgtaacccataccattacaaccactgttataagcgaggaactggcagtccgtatgctggacagcggcaatgatatcagggacgtgatctgcgcagccatgcttcatgatctgggaaagataggaatacctgtggagatactggaatttcccgggaaattaagccctcaggccatgcgggtcatgaggacccatgtggatttgaccgagcacattctgggaacaaatgtgtcagccagggtgagggatatcgccctgcgccatcatgagaagctggatggttccggttatcccagggggttaaacgccgaatctctggatatgccccagagaattgtggcggtggctgatatcataagcgccctgacaggaaccagaagctataaggatgcattttcgaaggaaaaaacagtgtccattctggaggacatggcggaaaaggggcttatagattcagtgattgtatccatgttcgtggagaattatgataccatcatgggggctgtgaggcagcgctcccagcctatcctggataaataccatgagatgcagcggcagtaccaggtcctggagcgcagaatggaggacaggaattcacaggcggctgccagggaatcctgagccggataatgttaagccatggaatcgtaaggaaatgtatattgacacagctggcaaaactggataaagtagggttatatgaggaacgtaaaaaggaggaatcatgatatgctgcacatgaagcggaaattaatgatggctgcggcaggtgtactggctgccctgatggtgtttcctgcatacggcgcaagccgtaaacccattaagtccataagtctgaccataaaagcagagataaagccggatacggatttcggagatgagctcatagagattgagaccagcagcaacaagtactctgtggacggctatgagatcctgaatgacgatgtggaatggcgggaggacaccgtacccagaatccagattaccctgacagccaacgacgattactatttccagtcccttcccaaggataaggtgaccataaaaggcggagctgagtttaaaaattccaagcgggaggattccagcaccaccctgctgatggatgtggagctccaggccctgaacacctcccttcatgctctgacaaacgtggtcctcacagaggacggcatagccacctgggacgccataccggcagcgggcagctatgaggtgcgcgtgtacagggacgacaaggcagtgggcgctgtcatgacagtcagcaccaatacatgcaactgccgcgagcgcatgcagaagggcaatacggcatacacggtcagggtaaggcctgtaagcaaatttgacagcaaggaaaaaggagactgggcggaatctcccagcacgtacataccggaggaaaaggcggcccagttcagggagaatcccacgggaggaaacggcgaatgggtgcagactccggaaaacggtaaatggtggtaccgcaacgcggacggcagctatccggccaacagctggcagcagataggagataagtggtatttctttgacgcacagggctatatggccaccggatggatacagtgggaaggcagggagtattactgcgctgacaacggcgagatgctgaccaactgtctgacgccggattcctactgggtaggggatgacggggcaaagattaaccagtaacacaactgaacacggaatacaggatgctgtaggagtatgggaattttactcctacagctatttttgaggtgatgtgtcatgaatggggaagagtggagaaagagaatctgcatggaaacagacaccggatattcctacagcctggctaaacggatggagaaataccgcaccaatccggtgctgggatacagaactgcggggtcaagggcagagtttgagacaggcgggatgttggtccgggaaatggagtccctggggctttcggacgtgcataaggacaggatatgcgtggacagctgggagtttgagaaggcagtcatggtttttacagacagccggggaagggagcaccggtttcaattgggggcttaccagactgatttccatactggcggattccgggaattcagcctggtatatctgggaaagggaacagcggcagattacggacaggtggatgtgaccggaaagctggttcttattgacatcaaccagagagatgagtggtggattaattttcctgtataccaggcctggctgaagggggctgctgccctgattgctgtccaggagcaggggtacggggagataaacgacgaagcgcttaacgcccaggacatagcgggcccggattacgccccggctttttccatgtcccgcgctgacgctttagtgctgaaggcgtccatgggggaggataaacaggtgcaggtgcgcctggacgcctcgtccacggtgcttaaggatcaggagacttataatatcataggaaccatacctggaacagaggaaggaatgattctgctgtcagcccattatgattcctatttcagcggatttcaggatgataatgccgcggtggccatgatgcttggcatagccagagccgtgctgcggtcagggtataagcccagaaagacccttgtgttctgcgccatggctgcggaggagtggggagtggtgaattccaaatacgactggtctgcaggcgcctatgagcaggtatttacggccaggcctgactgggcgggaaaggttatcgcggatctgaacttcgagctgcctgcccacgcccatggcaggaaggatgctgtgaggtgcgtgtatgaatatgcggattttctggaggaatttataaccggtctgccagccggtttttttgcggaccagccatatccggagggagtggaagtgctgagtcccatacagacctggtcggatgatttttccatggctgtgggagggattccgtccatggtcaatgatttcagcgcaggggaattcatggagacacattaccattcccagtatgataatgaaaatttttaccaggagccggtataccgcttccaccatgagatgtacgccggccttgtgctggcttttgacaggacagcggcagtgcccatgaattttgcgaggctgtttgaaggcgcagcggccagcattgacggcagtgtgtgccgcggggcagacgcggatctgcccgggctgcatttggttttgaaacagggaatccaggcgggagaagccctttacagtaaaataagggagataaacagggcatacggccggcttcttgaccgcggcgaggaagaaaaggcctttctgctggcagccggatgcaggtccctgaaccgggaactcctgcgtatctttaaaaaggagcaggactattttgtccggctgagctggcacgatgatgtgctctttccccagcaggcggtccaggaaaatgtaagggccatggacagggccattgcctgtcttgaaaaccgcaacctgcccggagctctggaggcggtctatacaatagacaacaaccgctatgcatttttgtttgaggaggaggtttatacctactttacggaatacgttctgaaccagccgcccggccggcttaaatggggggcggggagaattgtccaccatcagaacctgtttcgcctggttgagaggctgaaggccagggccggggaagaaaatccggatacccgggaggaatatgatatccttgtcagggcccgggagaaccagcttggctgctatggtgatgacatccggtacatgataacatctgccggcaagctcctggaggcaatccggcaggccgggcatcgggcttctgaattaaaacatgatttatatacaagtgagagtaagatacaggaggagtaaatgagagatggaaagccgacaattataccgggttaaggaggaggacctgcccagattggagaaacttctgaccggatgttttgagcacgacccgttatactgcaaactgatcccggatgaggagattaggaaacggcttctgccggagctgtttgcctgtgacctgacagaattctatgagacctgcgagatttattcagacagccctgagatgaattccctgctggttgtttccgatgaaaccgagccctataatccgctgacctattatctggcggaggcatgggcgtctctcagaaccgatgagttcctgattaaggaggaccccagccttaagaccctgtggaaattcatgctgggcaaggattacctcaactccagatggacggcacagctgcaccggacagaacggatacacattatctatctggctgtaagaccggatatgcagcaccacggcctggcagccctgctgttaggcgaggttatccgttatgccgaccagcacaagcttatgatatccctggaaacccataatccggataatgtgcctctttatgagcattttggatttaaggtatttggcgtgatggaaaagcattttgcgctgagacaatattgcctggtcagggaagcataggagccggggagaggaaatagaagacagggaaaggaaataagaggcggggaaaggaaataagaggcaggctgttgcgggaacttccataacttccagtcatgataataattccaaacttgtatatttcactatagcgaaattctgtcggaaaggttgaaataccttttcaaatgatatatgattgaaagaaattatattattatggatagatataaccataaagaatagaagacaggggagatatgcactatgaattataatgtgactgtgattccaggcgatgggattggaccggagattgtgagggaagccaggaaggtgctggaccaggtgggaaaggtgttcggtcattcctttgattatacagagattctgatggggggatgctccattgatgcgtacggtgtgcccctgacagaggaagccctggagacggccagaaagagcgatgcagtgcttctgggggctgtgggcggagacgtggggaactcacggtggtatgacgtggctcctaacctcaggcccgaggcagggcttctggctatccgcaagggcctggggctgttcgctaatatcaggccggcttatctttataaggaactggctgaggcctgccctctgaaaaaggagattatcggggacggatttgacatggtcatcatgagggagcttacaggcggcctttattttggggacaggtacacaagggaagtggacggcgtcatgacagccgtggacacacttacatataatgaaaaggaaatcagaaggattgccgtcaaggcctttgatattgccatgaagcgcaggaagaaggtaaccagcgtggacaaggccaatgtcctggattcctccagattgtggaggaaggtggtggaggaagtggccgctgattacccggaggtggagctgtcccacatgctggtggacaactgcgccatgcagctggtcatgaatccaggccagtttgatgtgattctcacagagaatatgtttggggacatcctttcggatgaagccagcatgattacgggctctatcggaatgctgtcatctgccagcatgaatgagagcaaattcggcctctatgagcccagccacggctctgcgcctgatattgcgggaaaggatatggctaaccccattgccaccatcctctcggcggccatgctgctgcgctattcctttgatatggaccgggaggcggacgctgttgaaaaggcggtacaggctgtgctcacagaagggtaccgaaccggggatattatgtccgagggatgtaccagggtgggcacctgtaaaatgggtgatttgattgcggaacggattggatgattgacagacggacggttatgactggatgatccggattagatgaaaggggatacaacatgaaaagtgatgcggttaagacaggtatgcagcaggcaccccacaggtccctgtttaatgctcttggtatgacagaggaagagatgagaaagcctctggtgggtattgtaagttcctataatgagatagttccgggccatatgaacctggataagattgtggatgccgtgaagctgggcgttgccatggccggcggtactccggtggtgttcccggccattgctgtctgcgatggtattgccatggggcatatcggcatgaagtattccctggtgacccgggatttgattgcggattccacggagtgtatggcgctggcccatcagtttgacgcgttggtaatggtgcctaactgtgataagaatgttccgggacttctgatggcagcagccaggatcaatgtgcccaccgtgtttgtcagcggcggtcctatgctggccggccatgtgaaggggcataaaaccagcctttccagcatgtttgaggcggtgggcgcttacgcggcaggcaacatgtccgaggaggatgtgaaggagtttgagaataaggcatgtcctacctgcggttcctgttccggcatgtatacggctaacagcatgaactgcctgaccgaggtcctgggtatgggacttaagggaaacggcaccatcccggctgtttattccgagcgcatcaagctggcgaaacatgccggcatgaaggtgatggagatgtacgagaagaacatccgcccaagggatatcatgacaaaagaagcatttatgaacgccctgaccatggatatggcgctgggatgctccaccaacagcatgcttcaccttcctgccattgcccatgaggcgggcgtggagctgaatgtggatattgccaacgaaatcagcgcaagaacccccaacctgtgccatctggcgccggcaggacctacctacatagaggatttgaacgaggcagggggaatctatgcggttatgaaggaaatcagcaagaaggggcttctgaacctggactgcatgactgtcacgggcaggaccgtgggagagaatataaaggactgcgtcaacaggaacccggaggttatccgtccggtggagaatccctacagccagaccggcggcattgccatattaaagggtaatctggcaccggattccgcagtggtgaagcgctccgctgttgcgcctgagatgttaaagcatgagggaccagccagggtatttgactgcgaggaggatgccattgacgccatcaagagcggcaggattgtagccggagacgtggtggttatccgctatgaaggacctaagggaggtccgggcatgagggagatgctcaaccctacctctgccattgccggtatgggactgggctccacggtggccctgattacagacggacgtttctccggcgcctccagaggcgcttccatcggccacgcctcacctgaggcagcagtgggaggccccattgccctggtggaagagggggatattatttccattgatattgacaaccatgagctgaacgtgctggtatccgaccaggagatggaagccaggaaggccaagtggcagccccgcacaccgcaggttaccacaggatatctggccagatacgcgtccctggttacttccgctgacaggggagctgtgctgcaggtaaaatgattatcggggcatcatgaaataacatgaagaaaaggagtgcagtatatgagcaaattgacgggggcagagattgtagttgagtgtttgaaggaacagggcgtggacaccgtatttggttatccgggcggcgctatcctgaatatatatgatgcattgtaccagcaccaggatgagattacccatatcctgacatcccatgagcagggagcttcccatgcggctgacggctacgcaagagccaccggcagggtgggtgtgtgcctggccacatccggtccgggcgccaccaatctggtaacgggcattgccactgcttatatggattccgtgccggtggtggccattacctgcaacgtgaccaacagtctgctgggcaaggacagtttccaggaaatcgacattacgggcgtgaccatgcccattacaaaatataatttcattgttaaggatgtaaaccgtctggcaacggttatccgaagggcatttaccattgcccagacaggccgccccggccctgtgctggtggatatcaccaaggacgtgacggctgcgccctgcgaatatgagaagcaggttccggaggaaatcgttcgccagagcgataccattacagagcaggacatggaccgggccgtggagatgatccgcaaagcgtcaaagccgtttatctttgtgggcggcggcgctgtgctggccaatgcgtccgacgagctgagggcatttgcccataagattcaggcgccggtagcggacagtcttatgggaaagggcgcgtttgacggggctgacgagctgtacacgggtatggtgggcatgcacggcaccaaaacctccaactttggcataaccgaggccgacctgctgattgtggtgggcgccaggttcagcgaccgcgtgaccggcaatgcgtccaagtttgcaaagaatgcaaagattctccagctggacatcgacccggcagagattaacaagaatattaaggtggacgccagcatcatcggggatgtgaaggtcatcctgcgcaagctgaatgccaggctggacccggtgaaccacgacgagtggatagcccacatagagcgcatgaaggatatgtaccccctgcgctatgacaagaacctgctgacaggtcctttcatcgtccagaccatcaacgaggtgacgggcggggacgctgtcatagtcactgaggtgggacagcaccagatgtgggcggcccagtactaccagtaccgccagccccgcacccttctcacttcgggaggactgggaaccatgggttacggcctgggtgccgctataggcgcaaagatgggatgcagggataagactgttatcaatattgcaggcgacggctgtttccgcatgaacatgaacgagattgccacggcaacccggtataatatccctgtggtggaggttatcgtgaataaccatgtgctgggcatggtacgccagtggcagaccctgttctacggcaagcgctattcccagaccatactgaatgattccgtggattttgtgaagatagcagaggccatgggggccagggcttaccgtgtgacgcagaaggaggagctggagccggtgctccgggaagccatttccttaaacattcctgtggtcattgactgtcagatcagctgcgatgacaaggtattccccatggtatcaccgggagcgcctattgcagatgcttttgacgatacagacttgaaaattaattaaaaacagtgtatagtagtctttaatatcttggctgcgttatcagattagcacgataaagcgacagaatgcaagccgggacaggtgggacagatatacgatggagtatacagtcaggcgacttctctgtatgcggtatggcattgtattgtgccgggttccgcatatggaggagtcctctgtgtatatatattaaagaggatatgtgcagcaagtacaaccatttaaaggaggagaacaagatgagcagagtttacaatttttcagccggaccggccgttttgccggaggacgtcctgaaagaagccgcggcagagatgctggattacaggggaacaggaatgtcagtgatggagatgagtcatcgatctaaggcttatgacaccatcatcaaggaagctgaatcagacctgcgggatcttttacatattccggataattataaggtgctgtttcttcaggggggcgcatcccagcagtttgccatggtgcccttgaacctgatgaagaacaaggcggcagattacatccttaccggacagtgggctaagaaggcatatcaggaaggcgccatttacggaaaggccaatgccattgcgtccagcgctgacaagaccttcagctatattccggattgctccgacctgcctgtttccgaggacgcggattatgtgtatatctgtgagaacaacaccatttacggcaccaagtactggacccttcccaacacaaagggaaagcttctggtagctgaccagtcctcatgctttctgtccgagccagtggatgtgacaaagtacggcctgatctttgcaggcgcccagaagaacgtgggaccggcgggaaccgtcattgtcattgtgagggaggacctggtgacagaggatgtgctgcccggaacacctaccatgctccgttataagacccatgcagacgcagagtcactgtacaataccccgcctacatacggcatatacatgtgcggaaaggtatttaagtggctgaaggccagaggcggcctggaagccatgaaggaatacaatgaaaagaaggctgagatcctctataatttcctggatgaaagccagttatttaagggtactgtggttaagaaggaccgctcactgatgaacgtgcccttcgtgacaggggacgaggaactggacgccctgtttgtgaaggagtcaaaggcagcgggctttgagaatctgaaaggacacagaaccgtgggcggcatgcgcgccagcatttacaatgcaatgcctgcggagggtgttgggaaactggtggaatttatggctgacttcgagaagaagcacaggaaataaaagtctttggacatataagaggagagttggattattatgaaaaaaattcattgcttgaaccccattgcaaagtgcggcacggagctgtttccggccggatatgagatgacagacaaggcagctgatgctgacgccgtcctggtgcgcagtgcttccatgcatgatatggaacttcctgagaacctgctggcagtgggccgtgcgggagcaggtgtcaacaatattcctctggactcctgcgcccagaagggcatcgttgtattcaatacaccgggagccaatgccaacggcgtaaaggagctggtgatcgcaggcatgctcatggcatcccgggatatcgtgggcggtatcgagtggtgcaaggccaatgcggaggatgacaacatcaccaaggatacagagaagagcaagaaggcatttgctggctgcgagattaagggcaagaagctgggagttatcggcctgggcgccatcggggcggaggttgccaacgcagccacccatctgggaatggaggtatacggatacgacccgtatatttccatcaacgcggcctggagactgtccaggaatgtaaagcatatcaccaacgcggacatcattttccaggaatgtgattatatcaccatccatgtgcctcttatggattccaccaggggaatgatcaacaaagaaaaactggctatcatgaaggatggggtggtaatcctcaacttctccagggacaccctggtcaatgacgatgatatggcggaagcgctggatgcaggaaaggtgcgctactatgtcagcgatttccccaatccaaaggtcgcaaacatggagagggtcatcctgcttccccatctgggcgcttccacaaaggagtccgaggacaactgcgcggtgatggctgtgaaggagctgacagattacctggagaatggaaatattaaaaactccgttaattttccgtcctgcgacatgggcatgtgccaggcagagagccgtgtggccgtgcttcatatgaacattcccaacatgattggacagattacagctatattggccgaacagggcatgaacatttccgacatgaccaataagagccgggataagtatgcctacacgctgctggatttggagcacaaggcagaggattccaccattcagaagctcagggccatcaaaggtgtgctgagggtgcgggtggttaagtaactgcccgtttccgtggacggactgtaaccttagataaacaggagagaaactatggcagtagtaaaaccatttatgtgtatcaggcccgcggcggacaaggcggcccgggtggcggccctgccctatgatgtgtataacagaaaggaagcctgccaggccgttaagggcaatcccctttccttcctgaacattgaccgggctgagactcagtttggggatgatgtggatacctatgacagccgtgtctatgacaaggccagggagctgcttgattgtcagattgaggaaggggtctatgtgactgaccctgaggagaattattacctctatgaactcaccatggagggaaggagccagaccggtatcgtggcctgctgttccattgacgactatgtgaacggcgtggtgaagaaacatgagaataccagggaggataaggagctggaccgtatccgccatgtggatgccaccaacgcccatacgggccctattttcctggcctacagacagaatcaggagcttaaggccctggtggcccaggtaaaggaggaggcgcctctgtatgattttgtgtcggaggacgcaatccgccacagggtgtggatgattggcgccagaagcatggtggaggccgtggaggctgcttttgcagccataccgggcacttatattgcagacggccaccacagggctgcctccgctgtgaaggtggggcttaagagaagggaagagaacccggattatacggggaaggaacccttcaattatttcctggccgtactgttcccggacgaggagcttaagatactgccctataaccgggtggtaaaggatttgaacggattgggacaggaggattttctggctgctgtggctgagcggtttgatgtggctgcatggggggatcctggctgcggggaaccgggggcagacgccttctggcccagggaaaagggaacattcggcatgtttctcggcggcagatggtactgtctcagggtgaagccggagtttcagagcagcgatccggtgaagggactggatgtgtccattcttcaggaccagcttttgggtccggttctgggggtaggtgatcccaggacggataaacgcattgatttcatcggcggcatcaggggattaaaggagctggagcgcagggtatccgaggatatggaagctgcgttctccatgtatcccacttccatagaggagctgttagcagtggccgatgcagggcttctcatgcctcctaagtcaacctggtttgagccgaagctgcggagcgggctgtttatacataggttggggtaggatacgcggacgcgctttgggggctgcgtccgtgagaggcgggaacgcagcccgggaggcggcggtttccgcagtgggagagactaaggcccaaggggcgggaaaacccggggaccgcaaaaattacgccgaactcctgatgagttcggctccatctttgctttgctccgggcgtggagcgccctgcgcaaccccggcctttcccgccccttgggccttagtctctccgaactgctccaaaaccgcctcccgccctgcgttcccgcctctcacccactacatttccagagcgtccgctgtctcttccccgcataggtatagaaaaaggatctctggctgatgatactggggaatcggaaagtggttgcctgtatttagattaacatttagacagataatactcagccagagggccgcatatcaggatgaaatcaagataatgcggccttttatattgtcctgtatattgtttggtatgccaatatccctggcatgccatttttctttttttacctgattttgatataaatgatgcaggcgggacgatacgttgcgggtgagtgggatgggggcgggggaggcggatgcatctacaggagcgttggtatcactaaggctgtgggaagcggctttaagattcaggcgtacccttgtctgagctcagtacctggattcctggcagtatctaaagcgcgagttgggtcgcctgaatcttgtttaaagccgatttccgcggccttagtgatacccgctccgcagccagcatccgcctcccccgcccccatcccgctcacggatggatgcccctccgcctcatttacatccaaacccaatcagaacccaatattattactgtcaatactgtcaaataccagcttgaaagtagacctcttagactcatccagatgatacagtagcttttctaccgcagtatcccagtccttttgcaggcaggggataatgatgtcgatgtgttctctgaaggtatcctccaaacggttgttggagatattgcctgtcatgaagcggaaacgctcgctctgggtctgtatcagtgcgtaattctggcgcaggtaaatgttagggcaggcgtccataatcatttggtggaaggaggagtctaagtcataaaagtaattgttgttctggaagcactcgctgtttgcgtccttatgggaaaaaatgtgatagaattcgttcagcttgtcctcgtccagaaatgaaccgtaatttttcagaatataaggctcatataatttccgtatctcaaaaatcatgttcacatccttaatggacagggcggttacggtgattcctttttttggttttatctcaataaggccctcctgctccagcctgcttaaggcatcacggatgggtgttctgcttatctttaattcatcagtcagtatttcctcatttaaaaatgtccccggcgcatattcacaggtgacgattttttgcttgattgtgttgtatgccaaggttttcagattggttttaaccatgatgaacataccccccctcttttaatatatatgaaagtattttatcatagatatcgcgccggttcaataagggggtgaaataaaatggttgaacaatagttatattgcataaaaatatggaataaaatcggtcattatatacaaaatataaaacacggtcagaaaatcagttgacatgatgtattcattaatatatactatgatgtatacaacaaagaatatatctcagctgggaggaagattaatgaaagcaatgtatattaatgcacccggtcaggtagagttcagggatatcgacaaaccggttaggcaaaaaggtgaggttctgctgaaactcctgtatgggggaatctgtggaagcgatctgggttcctacaaggggactttcgcatacttcgattatccaaggataccaggccatgagttttctgcggaaattgtggaggtggatgaggacaatggacagggccttcgcccgggaatgattgtaacctgcaatccatattttaactgcggacactgttattcctgcgagcatggaatcgtgaatgcatgtatggataaccagaccatgggatgccagagagacggggcgtttcaggagtatataaccatgcctgaggagcgtgtgtatgacggaaagggattggatcccatgcttcttgcagccatagagcctttctgcatcagctatcatggtgtcagcagggcagaggtaaagccgggagacaaggttctggtcataggagccggtaccatcggcgttctggctgcggtggcagccaaggcaaagggggcagtggtttacatatccgatgtgtccatgggaaaactggacatggccagggagttcggcgtggatggcatcatccttaatgattccccggagggctttgacaaagcggtgaaggagattacagacgggaacgggtttgatattgccattgaggcggtaggacttccatccacattccagaactgcattgacgcggcctgttttgggggaaaggtggttgtcatcggagtaggaaagaaaaacctggatttcaattttacactgctccagaaaaaagaacttaatgtatttggttcaaggaatgctcttaagaaagattttgtggagctgattgacctggtcaaggaaggaaaggtaccggtaaagggaattattaccaatatatataaatttgaggatggggccaaagcattcaatgattttgctaacaacccgggaaatatgcttaaggtaatcctggactttacagacagataagacacaaaaggtaaaggtaacaaaaaatattaatatatggagggtaagattatgagatttaacagattagcagcacttacaatggcaggagtattggcagcagccagcttgacagcatgtggaggcggaagtactgggtccaccacagcggcaggcaccacagagagtgcggcggcagccgattcagcaaccgatacaacggcagcacaggcagatgcagatacagagccggcagcaggcgatgtggttacgattcaggttggctatgagaacgccacttctgagccggcagcaaaggctgttgagaaatggaaggaactggttgagtctaagagtaacggaaccatcaagatggaacttttcccaaactctgcattgggtaagaagacagaactgattgaccagatgattctgggcgagcccatgattacagtggcagatggtgcgtttcttgcggattacggagtaccggactttggaattttctatgcgccgttcatgtttgatacctgggatgaggagtggtcagccattgacagcgactggtacaggggactgtgcgatgagctggcacagaaggcttccatccgcgttctgtcatccaactgggtatatggagccagaaatattctttccgtaaaaccggtgacgcttccggaagacctggcaggcctgaagctgagagtttcatccaacgatctttccatcagcagttttaattccctgggagcatcctctgtgggtatggatatgggcgatgtttaccaggcactgcaggcaaagaccattgacgctgtggaaaacccaatcactcctcttgccaacagaagcttccaggaggttgccaagtatctggtagaggatgagcatatactggccacatccatgtggatttgcggagatacgtttttccagagcctgacagctgaccagcagaagatccttacagaggcagcagacgaggcaggactgtacaataatgaattacaggaagcagcagaggaagatgcaaggcagaaactgctggatgcaggcgtgaccatcactaccctgacagacgagcagaaggcaaaatggattgaggcaggacagccattctatgatatcgcaggcgaaacccttggctggagtgacggactgtacgacacagtaaaggaagcagcaaaataaacagttctgactacagataggagcatggaatgaaaaaagacagcaagctttttaagattctgattaatctggatatagtgattgcttctattgcactggttattcttgtaggatgcacatttgcgggcgttatcgcccgctatgtggttggaaaaccattcggatggatagagga

SEQ ID NO: 3157 - DNA, 78249 bp, Unknown
  gut microbiota DNA sequence
ttctttacctcccttacaaacatggatttatataaattataacacatagcaacccaaaagaacataacggtaccttctgtgcatatgtataatcctgtcccatgctccatccccattcaagcaatcttaaacagacatgggcaaaacaacttccagaaaaaagaaaatcccctggtctgctgcccaaaccaggggatgtcatctacatcacaactccaacctcatcaatcgccttaccaatatcatgcctcatatacttattcccaaattccacccactccgttgccttataagcattttccctggcttccttcagagtatttccttttgctgtaacccccagcacccttccgccgttggtcactatattcccgtccttatcgaacctgcttccggcgtggaatacataatacccgtcctgtccgtcaaaccggtccaggccgtctatcttatatcctttatcataatgctccgggtatccgtctgatgccagaaccacacatacggctgcattgtcctcaaattccagctctatctggtccagggttccgtccacgcaggcctcgaacacatccacaatatcattcttcatcctgggcagcactacctgggtctccggatctccaaacctggcattgtactccagcaccttggggccgttttccgtcagcatcagaccaaagaaaatgattcctttaaattccctgccctctgccttcatggcgtctacggttggctggtacacatactttctgcagaatgcatccacctcatccgtatagaatgggctgggtgaaaatgttcccattccccctgtgttcagtccctggtccccatccttagccctcttgtggtcctgggctgaagtcatgattttaatcgtctttccatccacaaaggagagtacggatacctcccgtcctgtcatgaactcctcaatcacaatcctgtcaccagcagagccaaactgtttatccagcatcagggtcttgacgccttcctttgcctcctccctggtgctgcagataagaacgcccttccccagcgccagaccgtctgctttcagcacgataggcatgggagccgtctccaggtatgcaagggctgcttccggagaatcaaaggtctcataagcggcagaagggatgttgtacttcttcatcaaatccttggaaaatgccttggaagcttccagtatggcagcatttttcctggggccgaacacacggatgcccgcattttcaaatgcgtccacagcaccggctgccagcgggtcatccggtcctacgaccactaaatcaatggcctgctctccggcaaatgcgaccagcttctcaaagtccatgacaccgatatcaacgcattcagccaccttggcaatgcccgcattgccgggagcgcagtataacttctccaccttcgggctctgtgatatcttccatgcaattgcatgttcacgaccgccgccgcctactatcaatactttcatgacgttcctccttattttgaaaacatggcacacatggcgtgcgctactgtcaaagagatgttactgcccattggcaatcatgttgattgctttaggaaggattacccactctgcctgctccataacccttctttgcaggatttccggggtatccccttcctccacttccactgccttttggaggataatggggccggtatccatgcccccgtccacatagtggaccgtagcccctgtcaccttcacgcctctggccagggctgcctcatgaaccttaagtccatagtaacccacaccgcagaaagagggaatcagggatggatggatattgatgatacgccctttatacttctcagtcatggccgccggaatcatcaccaggaatccggccagtacaatcaaatccaaatcatattcatctattttggcaagaaatgcctggttgaacgcgtccctggtgggaaactgttttggagaaatgcagacagcccggatcccatgctttctggctctctccagagcataggctcccggattattgctgatgaccacagatacctctgcattggtaatatcaccatgatccacggcgtccaaaattgcctgaagattggttccgcctccggataccagtacgcccactcttagcataaggatacacccttctctcctttttcaatggagcccactacataaggagcttcgcccgccgccttcatggcttccatggttttctccacatcagcaggattaacggccactatcatacccaatcccatattataggtattatacatcatctgctcttcaatccgccctttttcagccagcagcttgaatactggaggaacgggatagctgtcctttctgatgacagccttcacgccgtcttttaacatacgcggaatattctcatagaagccgccgccggtgatgtggctgcacgcctttacggtaacgcctgcttcctttacgtttctcagggccttcacataaatcctggtgggggcaatcaacgcctcgcccagggtagtccccagctcatcataatatgtattcaggccttcctttgtcagctccttctcaaataccttgcgcaccagtgaaaaaccattgctgtgtacaccggaagaggccattccaatcagaacatctcctgcacacaggttttcgcctgtaatcaggtccttcttatcaacaataccaactgagaatcctgccaggtcgtactcatcctccggataaaagcccggcatctctgctgtttctccgccaatcagggcagagccggactgcctgcatccctcagccacgccttttacaattgtagcaattttctccggaacattctttccgcaggcaatataatccaggaagaacagaggctcaccgccagcgcaggccacgtcgttgacacacatagccacacagtcgattcccaccgtgtcatgcttatccatcaggaatgccagtttcagcttggttcccacgccgtccgtaccggacagcagagtaggctcctccatccctttgaacgcggacatggaaaatgctcctgaaaatccgcccaggccgcctaatacctcagggcgcatggttccctttacatattccttcatcagttccactgatttatagcctgcctcaatatcaactccggccttcttgtaatccatcatggtttctatcctctcttatctgctatttcatttgatttccctttaaaatttccttttatttcccttttatatttagctggatatttcctttgcccgtttcctttaatctgtcttatttcatctgtgcaagatattccttatagcccacctgctccagcttctcagcctttttcaccacatcgttcttcaggctttcggaatacgctttcagctttgcaagcagctccgcatcggaggtggccagtatctttgccgccaggattccggcgttggcaccgccgttaatagccacggttgccaccgggataccgcttggcatctgcacgatggaatacagtgaatccacaccgcccaggtcagatgtcttcataggaattccaatgaccggcatagggaaaatagccgcgcacataccgggaagatgtgcagccttgcctgcacctgctatgataaccttaaagcccttatcctcagctgcctttgcccagtcaaagaatacatcaggctccctgtgtgcggaaataattgtcatctcgtaatcaatgcccagcttgtccagaatctcagctgcctttgccataacaggcatatcagagtcgcttcccattacaattcctacttttgccattgttcattctccttttctaaagctcattatccttgtagataattattattagtttttcttataagtatctttatatagctcaattatacttataatcataatactaggaaatgcgtatgccgtcaatataaaacttgaaaaaagtcttctgcattttaaattgtttttataatgtatctgcctaaaactgcctggttcctgcatctatcagccaggctatcatttccgacacaggctggtgaacaaaatacgcaggggaatgccggtatggagcccatatgggtccgccgtacattcccctgcaaaatccttcaagtttctttccggtatcctattgcctgctgataaattccaaacattatctcaattccagaaatataaaatttatcattatgttttccttggcatcagtaatcatacttctctgcggctttcttcagtattatcacacattgcacctcagcattacattctatcatccgtaacttccattgcacgctgccgtcttagccgggcattaaaaatctcaatcatccatcagtcatcgtagtcattgccatcgtggtcatcatcgtgccggtcatcgtcatcatcaaaccggtcatcatcgtcaaaacggtcatcatcatcaaaacggtcatcatcgtcaaatcggtcatcatcatcaaatcggtcatcaccatcaaatcggtcatcatcgtcaaatcggtcatcatcgtcaaaccggtcatcatcccaggctcccgtatcattgtcccagtccacatccgcaatcctgcctgtagcggcatttacatccacctcgagtttccttccatttaccagaaacctcaattcataaacaccgtcgtccaggtcacatcccttgtaggtcagttcattttccttcagccccaattcctttatggcgatccgcttcgcctcattcttccctatatataactgttctgactgtttcccgttatccttaagtgttatggtgatatcaatgccgtttttgtttactgcttcccatgcagcctcttctatctctttcatgaagtcggccctgggataaacagatcctttttcagactcaatgagcagctctttctcatttttgtctccgcggaaccatcccttatcatccatacgctttaccagtctgcgtacagctgtatcacagtccgcaccggcaaaattcccttccccctctaataattttcgtccgtcctgattcagtccttttgcctccaggacctctccttccctgtcataggaaagggatatcttcggacctgcgctgaggaacacacgtccccatgtttcttcctgaatccttgtttccctgttggagggcgcacccagtgccgtgctgcccataccaggcagagaaagggccatgaaacctgcacacaccaatatagctgcctttttaatcctctttgccgtcataattattttcctcctgtctgctgtgatttatttatctacatccgtagaatacgtgagacaaaatgtaaaaccggggtcgcggacaaaaaattttattttatttcccttctcattgctgctgccaaaatattgacaaatgcagttggctgtgatatagttgccgcattgtaatgaaggagaggcaggtatgggcttttatatattaaatcaacctcggaagaaagagatctctgtacaattcataccgatgaaacattgtacagagtatggcgtatcttatgcgctttcgtgatttcatcgggaaactgagtaatggactggaggcagcagtgtaggctgccgtcggtttgattgctcttttttcccgtggttatccgtgcataaaaggctatggacaatgttttgtccatggccttttgtaatgtgaggaaatcgtatgattttgtaatacggcagaaggcaggtgcaaatttggcatctaccttctgcctttttttgtccggttacaaacaatacggtttcctcccatgcagctttcaccgctcatccatacattgcaatacagcgcagcaccattaaatataaaaggagtgtttcaattatgagtttattagatataacaggactttcccattcttatggggacagccgcctttacagtgattccgatctttcccttaaccgtggggaacatatggggattgtgggtcagaacggaaccggcaaaagtacgcttatcaaaatatgcacggaacaggtcatccctgattcaggccgcgtgtcctggcagccgggcattaccattggttatctggaccagtatgcctgtaccaatcacgttttgaccatggagcagtttttaaaatcatcctttcgcagcctatatgagcttgaagccaaaataaatcgtctttatgacgagtccgcattatcctgcaatatggaggttctgaaccaggcatcactttttcaggagcagttggagcgcagcggtttctactccattgatacccatattgcccaggtggtttccggtctgggactggtctcaatcggtttgtcccgtcctcttaaggacatgagtcaaggccagagagccaaggtcatcctggccaagcttctcttggaaaaaccggacgtccttctcctggatgaaccaactaatttccttgacaaggaacatgtggaatggctgggcggttatctttcggcgattgaaaatgcctttatggttgtctcacatgaccgcacatttctggagcggatatgcacacgtatctgcgatatagacaacggcaggctgtccaagtattacggcagctatacggagtttctgaaaaagaaggcatttctgcgcgaggaccatataaggcagtacaatgcgcagcaaaaagaaatcaaaaaaacagaggagttcatacggaagaacatagccggcaggaaagcacagatggcccgcggacggcagaagcagctggaccgcatggataagctggcggccctggaacaaaaggaaatgaaaccggaattctgtttccaatgccttcccttgaccaaatgcctgcatttgtccgtaaagcgtttatctgtggggtatgattatcccattttgtcccatctggatttttctgtaaccggaggacagaaggtggtggtcactggttttaacggcatcgggaaatccaccctgctgaaaacattgacgggaagccagaatcccctggatggggtcttcgctttttcacagcaggttacaatcggatatttcggacaggatttcagctgggaaaatgatacattgactcctgtccaaattgtctccaatgcctacccgaagctcacgcttaagaagatacgccagcatcttacccgatgcggggttctaagccggcaggccgtgcagcccatgggcacattaagcggcggcgaacaggcaaaggtcaaattatgccttctgacgcttagtccctgcaactttttgattttggatgaacccactaaccacctggatatccaggccaaggattcactgcaggcagctcttaagagctttcccggaaccatactgttggtttcccacgaggaatccttttaccgcagctgggcaaaccgcataatacacattggggattactcttctccataaatacgctgcggcttttgttgtgccgcaggtaataacataaagacggaaccagatggagtatatcccagcccatctggttccgtcctgcttttggtcataccgtagtcatttggcggtatttcctcccggcggcatctcttctattttcttacgttacataacacgctgcatgaccagcacatgatatcagtcatcgtcgtcctcatcttcgtcctcatcatcttctccatcctcatgcccgtcgttatcctcttcttgggaatcgttttcgtcgatatcgtcttcatcagagtctccttcatcggaatcgtcctggtcagaatgctccccgccgtcatcttcgtcccggtctctgttatcatttaatccatttccggccttcccattatctctttcatccgaatcatccatatccttatcatcgtctgcaccgctgctttgtctcaccacattgtttctgccggatttatccctggcttttttgatatcatcatctctgtcatccgtatcgtctttgtcgtcatcatccctgccgtcatcgtccctgccgtcatccttatcaccagctttatctttaccggcatcttcctccctgtcatcgccatcatcttcatcatacttatcggggtcagcatcattttcttcatcatcattttcagtgtcatccccacgctcatcctcgtccctgtcatcttcaccattgccgtctgcatcttcccccgttcctcccggaggcattccgatgaatgccggcttatcccctcctgttcctccgggtatctcaccattatgatggggggcggcggcgggggggctgtcctttcctatgctttccacatgtacttccaccggcataccatcctttaaaagggtgtccagccctgtgcgtatggcatcggcccgttttgccttccagcgctcgctcccgccggatgccgccacatatacagtccctccttcggtcagataacccatttccatggcccgttccaccagtatacctgtcatatattctgagtttcttcccttatatgacacctggtcaatgagtttttttccgtcctcattcacaccttccaggccaactacgcgatccatataactcacagacattttcacatctggattgattctcacctccactgtaccatacggcattccgtatgcgccataggccccgcctcccaatacagccaggcacaggcaggcagccgcggccagcggagcaagacggaacaggatgggagcctttggtgtctgccgggcaattatctctcctaccacctggccctcctggtaacccatattggcagcctttatcattctgccttcattgtcaaggacaatggcatatgacggatggcactccattacaagataagtcatacggttccctcctttcccggtgatatctgacacagatgtccccggatgatttcatatccgttggtataagccagcaaaatggcaaccagatacgtccggtgccgttccatggtctttctggatacgccggacagctctgccagctccgcaacgggaagtttgcggttctgtatcaggtgttccagcagcctgggatggctcctggcagcctccagcactttgtggcatgccctgagggtacggtcctgccgggggcagttatccgccacatcagacagactgatgccatactcagacagattccttcggaactcatccagctcctccctggtagccgttctcacattccacagctggattccgtttttctcatcaggcgttacttccaatagggcatgggaatcatcctcctgtcctgccggggcatcaaaggaaaccaatccctgatggcgcccctctttcctgatgtagtctatgagccggttgcgtatggacgcggcagcataaggcagaaacgcgcctcttccccgctcatacccctggaccgcctcataaaaggcaaacatggccacactaagctggtcctccctggcctgggttggagctccctgggtaaagcggactgtctctgcctgtatgaaattcatatactggccaatcaggctgtcagcagcttccggactcttctttgcctcatagaccaaacggactatctggtgctcttcccccaagatatcacctccatttaccatagaatacgcaggaaccagttctgtttcggggtcacaggaaaattgtttcctttttctttttattttcctttttatttccttttatctagtatagcagaaaaaatcacttgttccatccatgaattggattgtacaagtgattttttaatatagagcacaccctcccccacaaccggagcagtgtctccctcatccatcatcgaatcatactgttattcacaatctaacccggccgcgccgtcatccgcttcatccagagcctcatttaactcctctgtgccttccagcacaaacctgccctgacggataatatcaatccggcttccatctgccctgacagcctttatatcccctaattccgagtagggaatggtgatatccgtatgacagctgaaatatgccttggacatatctgtctttctgagaagggatatctcattgtccctggcaatgacctccctgccgtcagggttatacatgggcgaatcctcagcaaagctgtagcaagtatcacccactgcaaaatgaggccccatcttttcggcaataaggataggcagcttatcgccaatggaaaaccttctggccacggcataggccgtagtattggtaccgatggcgaactcgcccaaaggcagccagtcatggtttcgcataatgacctgcttcacaagggcctggccctgtctgcgggcgtccccggcgtccttatcatttccagctgccccagcgcccttatcatttccagcagctccggcagccccggcgtcctcaaaattcccgcaggaatactccgtcaccttaccatccttaaacaccatgcgcagattcctgaactgataatcctccacataaacattctttacgtgcagcagtccttctgtccccttcaatatgggggatgtaaaaacctctcccaacggaatgttcacatcagacacacagttctcaaaattagtctccttttccctgtcccttaagggatggagagccaccttcatggatgtctcattgccgtcacggcctgttatgagcacatagccggcctcatccagtgcctggatgatacactgctgtattttctggtacttctcataatccagtgtattgatccggatggtttccctgaaaacagcctcgaaatccggcccaatctctggtttgggaaaggcaatgatggtgaagctggtctcgtctcccggcatatattgatttacaatctgcctggattcattggcataagccagggtcagcgcctcctgatgggcgttgagggccagggccgcttttttattctcaggagcaaagccttcctcaccaaatgtctccaccagggcagggccagcgcaccaggcggcttccttccggtaggtctcataggcggaccgcagaacggccagcttcctctccttaaaagcattgcccatataaagggcgctgtcataacgatggtcataatcgtactgcttgttgggagatgtgccgtaatatcccctgcgtccgttcgccctgcggttcacggactccaccgctgccctgtaacagatgggttcaagtcccatctcccggaagtactccaccgccctgcggatcatccgctcaaagcccagctggaattccaccacaacggttcgttttttcttcaggtccctgcccatgacctgaaaccccttcctgaatccttccgtataagtggatgccatctggtcaatggtctcctggggaagactgttcatgaaagaggcaagctttatctctgtctccgagacatattccccataggcatagagataccgcaaatcagtcaaatcccgcttcatcacgatatctgttccaaaggaaagggccggatccagtccctcccgaatccgccagtccacggtgacctccgcatagtcgctgacaaaccagtacagggaatccttaatcagctgctccagaggcgcattttttccctcctcccatgcctgggcaaaaaggttatacacttccaggaacagctcattcagtatggtgatattcataagccgcatctcaaaggcatatacaatatcagcccggatttccgtatagagaaaggataaaagctggccgtagccatcccccaaaacctccaccgcgtaatccggattggcaaagctctccctgtaattttcaggcagaatgtcctggtacagggcgtaattttcctcctgcagcgcctccagggtcaaagaagtcccctccagcccgtcctccccgcttaaaccggtttcttccacccgctttgccagtcgctctatcctgcggataaaagccgaaaccttcttaaaataacagccgtaaggcagccccatctcctctgtatccatggacctgatacgctccatggacaattcgtagcgctcccttacggcatcattctcttcctgtaataagattctgtaatccatctgcatttactcccatctatcttacaataccggttatgataatcacagcccacacgatgaccagcaccacgcagatactgattcctattttcgccagtatgtaattgcggtccttttccataaatgagcgcacaccgtaccacagccccataagggctgcagcaaggctggaaaagccgtaagcccctgtattcaggcctccctggcccgccctggccacagacagatacatgctggccgtgcctaaagccagtcccagcactgccagtgtcagacaatagtagctgtttcttgcaaaaggatttctaacatacgataccttatcgccaatctgcctcaacgggaaagcctcctttttctcaatttgcaccgggtccattgtaccaggcggtaacacagataacctgcggctgctcccagggtgttgagcagcatatcatccacatcaaagcttcccaccttgaacaccagctgcagagtctctaacatcagactgaaaacaaagccgaacataaccgtgttgtaccactttttgctgcgtctgctgataatggggagaaagaacccaaaaggcatgaaggccgccacatttcctatcatgttaatcatgaacaatgtgggtcccaacacgtcataataccggaaataccgcgtaatttccttaaagggcaccagattatactggtaccccctgtctgtgtctgtgcgcccgaaggattctgaaaaaaacatgaaatacgccagaaagcaaagatacagtatgaataatacccagcccagcttttgacgctttgttgtatttcttatcattgtcagccccgcttactaaaattcaatttcggattttcgtttcagcagcagcgctccatttacaatggaaatgattccaaccgtaaggccggtcactgctatgatgactcctatcgctatgcagccagcccctgtgttacgcatggttttatacactctctccatattcatcgcctttcttcctggaaacatcattatgcctgggctccatactgctcatagtaagcgtcgatggctgcctttatctgatcgtcgatgactaccttgccatttatttctttattatagaggtgctccaccacatctgccatggaaacgatggcggcagtggggaaaccgtataaatccttaatctcatccagagcgctcctggtgcctttgccgcgctccatacggtttaaagaaaccatgagtcccttgatttccacatctccctgggccttgatgatggggaatgtctcctcgatggacttgccggaagtggtcacatcctcgatgataactaccttgtccccgtccttgataggactgcccaaaaggatgcctgtatcgccgtggtccttgacctccttgcggttggagcagtaacggatgtcttttccgtacagctcactgattgccatggtggttgccacgcttaagggaatccccttataagccggcccaaagagcacatcaaaatccagtccgaaattgtcatggatggcctttgcgtagtactctcctaattttctcagctgggttcctgtgacatagcttcccgcattcatgaaaaacggggacttacgtccgctctttaatgtgaagtcgccaaattttagcacactgctttccaccataaaatctataaattcctgcttatagttttccatcttccttaaacctcctgtatttacgggccgtttaaccgctctgtaattcttttgctgctgccttttttaaactgcctttgtcactgtctttatcactgccttttatcactgtcttaccctgccggtgctacctcacagcccctataaggtcccggatatctccgataccgtacgtttccatatatgcccggattccatccacagtctccaccgtggcataggggttatggaaattggccgtgccgatggcaacagccgtggcgcctgccagtatgaactccagggcgtcatctgcatttctgattcctcccatgccgatgatgggaaccttcactgcctgggcaacctggtataccatgcgcacagccaccggcttcacagcaggaccggacagtcctcctgtcctgttggccagcgcgaatgcccttttgtgaatgtcaatcttcatgcctgtaagggtattaattaatgaaatggcatctgccccgccagcctctgccgccctggccatgacagtgatatccgtcacattggggctcagcttcatgatgatgggctgccttgcatgtgcctttacctccctggtaatggcctccaccgcctttgggtcctggccgaaggcgataccgccttcttttacattgggacaggatatattaatttccagcatatccaccggctggtccccaagacgctccaccacatcaatatattcctccgtggtctttccgcagacattgaccacgattttcgtgtcatactgttttaaaaagggaatatccctctttgtgaacacgtcaatgcccggattctgaaggccgatggcattgagcataccgccgtatacttccgctatcctgggagttgggttgcccggccacggcacacttgccacacccttggtaaccactgcgcccagacggtttaaatccacaaactcactgtattccatgccggaaccaaatgtgcccgacgcttccattaccggattcttaaattccacaccggcaatatttacactcatattcatctaaacggtacctcgctatctttcacctatacatgcctacagctcaatctcatctgccctaaacacaggaccgtccttgcatatacgcttattgtgtacctgtgaatggtcatccacttctttggaccggcacacacaggccagacaggcgcctactccgcaggccatcttctcttccagggaaagccagcactccagccccttttcggccgcatatgccttcagtgcccggagcatgggagtgggaccgcaggcgtaaatgacatccgccgtaaggccctgctcgcggatagcgtccagcacatttccgctggttccgaagctgccgtcctccgtggctgcgtataccggaccgtatgcctcaaattcatcctttaagaacatctggctgtctctgtatcccagcacggactggaccagattgtcctcttcgtccttgttaagctcatgaagagcttttgccagttccagcataggcggaacaccgatgcctccgcctatcagaaatgccttttttccagcctccaggggaaaaccattgcccagaggtcccaggacatcaatggtatcgcctgccgtgagcccggaaaactccttcgtgccttcccccgcaatgcggtacaccagcctcagctctcccttttccttatcaatgccgcacaaactgatgggacgcggaagaatcctggccccgtcttttgaataaagggatacaaactggcccggaactgctgactccgctatctcaggcgcttttatcctcatatcgtatatatcggcagccagctgctcctggagcgtgacggctgctgttattttcacttttgccataacatgaatctcctgtctcttacagtacgctactgatatcagcaaccatgtcaatcactgcctgtctggatgcctcgccgaagtgctccggcccgaagttcttatacttttcctgtttgtaagccgcaatgattcctctggaggagttaaccacagcgccaagcccgtcctggttaaaacaatgcttcaggtcagcggctgttcctccctgtgccccgtatccgggtaccaggaaataggtgtggggcatgagctttctcagaatctcgctcatctcaggataggtggcgcctacaacagcgcccacattgctgtactcaccgtccatacagcgggcaccccactcctccactttggcggccacccactcatagaggggcttaccgtcaatcaggcggtcctggaattcgccgctggacggattggaggtcttgaccagaacgaaaaggcccttgtcctcactcctgcatacatccacaaagggcttcacgccgtctgttcccagatatgggtttacagtaagtatatccacattgaatccgcttaaggatttgcttcccacctgcaccctgccaagatggcctgctgcataggcagcggatgtggagccgatatcgcctctcttggcgtcgccaataacaatcagtcccttttcatggcagtagtccacagtcttcttatatacggtcagtccttcgatgccgaactgctcatacatggcaatctgcggctttacagccggaatcaggtcaaatgtatggtcaatgatttccttattaaactgccagatggcatcagcagccccctccagtgtctctccgtaagcatccagggatttctttaccacatgttccggcacataggacagcatgggatccagtcctacgcagattggggcattggttttctttattttttcaattaactggcttatcataatgttctcctttgttacgagtttttcactttgcatgaattctttccccattttatcatataaagtaccttgtttcaaggaatgatattccagtattgcaattattttaacggacccgtaaacgaaaaaaacgccgtacagggaaaaccgatgtgatatcagttcctgtccggcggcaaatcccaactcaattcctatacttctgtcatacactcctccctgaaacgaaatccccatccgtccccttcccagggactggcaaatccgttttctatctccatggcattatctatgatgccgtcaatccagtcaaaggactctgctccataaggactcctgaccgtgcacagcagagggatatcgtaatccttataataatggggcaggaccggcaatccgaaggcctcagccagggcagcggattccctccatgcctccacccctcccagccggacgatgtccggctgccataaatccagggcgttgcgcactgaaagctgttttaaagcctcaaaatcatattcccgctcccccatggccagcgcaatgccgcactggtttctcaaaagctggtatccggcatagtctgtgtggaccaccggctcctcaaaccactgtattcccatggaggaagccctgcgggccagctccagcgcatccggcacattgagtccctgattggcgtccatcatgattttcacactgtcccccagcgcctccctgcactttgccagacgttccgcatcccgttcgatgcttcccgaaccaaccttgattttaactgccttaaaacctctctttttataatccagcacttcctccagcagttcctggtccgtgtaggaaatccagccgccgctgccgtatacaggtatccttctccggttggcccccagcatcttccacaccggctggcggcatgtatgtccccaggcatcccacatggccaggttcacggcagcaatggcgcagttgttgattcccgtattgccaaagtattccgcctcccggtcccagtcagccctggccagcaccgtatcatatacagcgtactctcccgcgctgataaagctgcagacatccctgagcgctccctccattgctcccggagaatagtggaaggacagcacatacccctggccccttacgccctccgctgtcatcagctccacaatataaaagccgatttggctgattgtgtgtgtggaatccgcaatgggtctgctgatatcagacacagccctgtaaaaatgtatatcctttatcttttcttttacattcattttacctgcagtcatgttctcaccatccaaagtattcttttacattcctgtagcatattccttctattatttccttcagatatttctcgccggagaaatattctccgcgctccaccagttctcccagatagctgcagagacagcggcggtaaagctcatggcgcggataacttaagaaactcctggaatccgtcagcattccaacggacaggctcaggggatacaaattccctgctccgccaaactggcgcatgatgccgaagggctggtcgttgaaccaccagggagcgcccagctgtaccttcccccttaccgtgccgtcgcagaagcctgctgccagaacggcaaagggttccatctgcgcagggtttaagggatacagaattgtctttggaagctgatcaagctctgtcagccggtccaggatacgtcccacggattttacggacgtggagtcatccacacagtcaaaacctgtggactgcccgatttcctgcaccttcctgtgattggcgtccagataggtaccgatatgaagctgcatcacaaaatgatattttttatagagctttgccatttcaatcaggaacgcggatttatacctgtttatttccacctctgataactgctccccagccgcagccttttgaaaaatgtcctccgcctgggccccggtgtattcctcccacgcaatgtgggcaatgccgttgtcgctgaccgttgttccaaattccgcaaaaaatgccagacgttgttccagcgctcccatcatggaggaaaaatccacgatttcctgccccgctgcctgggaaaggattttcatataatccgaaaatgtcttccgctcgcagtaaaatgccctgtcaggcctgaaggccgtgagaatgcgcgtctttaaagctgcattctcctttatttttatgtgatattccaggctgtccgccggatcctccgtggtgctgagcagttctaccccggaccgttccagacaccatccgggcgtcatgtgaagctgcctgatccgctggttggtacgccggtaaatctcctccgcattatccggtccaaggggttcctctatgtcaaagtaccgcttcagctccagggcgcaccatatataaaggggattgcctgcaagatagggcatgatctgcgcaaatttcagaaatttttcatagtagctttttgttccggtgatatactcctcgctgattccgaatgtgcgcatggccctccatttataatggtcatgagccagccacatttcacccaaatccttgaactccctgttttcacagatttccctggcctccagatggcagtggtaatccacaatgggaagcctctccccatagctgtggtacagccggcttcccgtggggtttgtcagaagaaactcctcggaaaaacaatcagaacccaatcagagcacctccatccaccggcaggcaggtgcctgatatgtatccggccgcgtcactgcttaaaaatacggcagccatacctatatctgtcacgcttcccaccttctgcatgggaatccgtcccaggattttccccaaacggacctggtccccgtccgtggccttatggaacatgggcgtatcaatccatcccggcgcaatggcgttgacgcgcaccccgtaaggaccgccttctgctgccagggtatgcaccaggcccagataacctgccttggccgtggcatagcctgccacctgcggctggccgatgtagctggtcatgctggcctggaacaggatgcttcccttcccctgctccttcatgtgggggaacagtgcctttgtcagcgcaaaagcgcccaccaggtgtacgttcagcacgtttacgtaatcctccaccgtcatgtcctcaatgtatttcttgcaatggtttcccgcattgttcaccaggatggtcaccggcccctgctctgctatgacccggtccgccatctcctgggtatggtctgtgtccgttatgtcaaactgataaaacacagcctttcccccaaactcctttaaggcttcccgcccctgttcccggctctcatagctcagcaccgccacctttgcgcctgcccccaccatgcacctggtgattgcaagccccagtccggtggtgccgcctgtaacaattgcggtctgcccctctaatgaaaaataacttcctgtatcaaacattgcctatgcctccctgcattttttcgttgcgtccctgtcctgatatttatacggtataaaatactctttgtggcccagcacctcgcttttgctctttgtgccggaagccacctctgccgccattttgagaagcttttgtgccatctcatcctgagagcagcgcccctccagcaccggcccggcgtcaaagtccatatcctcctccatggccctgtaggtagcagagtttcccgtgattttaatacagggaaccacagcggatcccaccacatttcccctgcctgttaccagaaatacaatatggctgtggcatgcagccaaatccatcagcccttcgctgtcattgggattggtgattccaaactgcatccagtatggatccggcgtggaatccaacagccacagaccaggatgaggcggcttaacccccaccttaagaactccctcaatgggtctgcttccgctttttatgagggctcccatgcttttttcttcaatggtggacagccctcccgcaaaattacccgggctgaccgaatactggcgcacggatttgcagtactccagggccttatcatatgtatccccaatctcctgcctggccctttcatttgcagcgcgccccaccagcatctccttaaggcctatggcctccacgatttcctcaaaaatggccgttccgcccaaatcggtcagccggtcgaaaaaccgtcccaccaccacatttccggccagcccgctggtgtaatcagaccctccgcactctgcccctatgattaaatcccggattcccatgggttttcttttggtatccttaagccgttcccgcatcagccccacaacagccaggcccttctctatggtctttctggttccgccctcctgctgaatgaacatccaggcggcttcctttccctccttcccggctatgtccgccagccattccggctgcacatactcgcaccccagcccgactgtcagcacagcgcccacattgggatggcgtatcagggcaatcagaaggcgcaccgcatattcattatccgtacagcccgaaaatccgaccacctctgtctccgggtcccctgcaagtcttacgatttccctggccacaaaagaagcgcactccacggtgtagatgaccagcaccttattgcgtattcccattgcgccgttcttcctcacatagcccatccagctatattcccttttaaggttatccatcgcctgcctcctactcatatctggtatccttgggcgctccggtcatcacgtccaggtggctggagcgctcatcgtacacgctgcggatattgtgaagatggacccattccccggcccttatgtcctttgatgccctggcaatgcgcaccccgtattttatgacatcctccccggcccttatgttttggagagcgattttatggccttttggtatcttctgaacagcctcggcttccctcatacatccatcgcccagaagccttagcgcaccggggatgagctcctccagggcagtggccacattgtctttttgttcaatctgaaatgccctttgcattatttccattgttccatccatccggcccgtcgtccctcctctacaaaataccgaatttcgcaaatgcatccgtggcgctcataccgtcctcgatggcctttctcaccgtcttttccccggcagcctttttaagggcctttataagtacctcatccgctgcttccctgggaatgaccagcactccgtccacatcaccgaaaatcaaatccccgtcatgaatccttacctgtcctatctcaatgtcgcacctaaaatccaccacctgggtgcggacgctggaatcctgggcataacagccgcaggaaaataccggccagttctgggacagcacctggggcgtatccctgtgccacccgttcaccacggcgccggacgccttcctggttctggccgctgcagtcagaagctccccccagtaggcgcaccgtttggttccgcccgcagcaatatatatctcattttccttcagctggtccagcgcctccgtcagtagcccaaagggctttttctgcggtccgtacacatctgtcatcagcacggtcatggcctttcccgccagcttcatatcctcgcgcagaggccggatatcctggggcagaaactggtgataatatcccagttcgtccagtatatcgcccaccacgggtgtatagagcttctccctcatcagggcgaatttttcattttcatcattccacaatttcatgacattacctcctctgctaataaccgaagcttaaagccccgccgtccacggcgaagtcctgtccggttatatactctgattcatctgacaccaggaacttgaccatggcgccgatatccctgggattgccgaaacagtgcaccggcattctggccagtattttctgcttcctctcttcgtccatgaccttgcggctcatctccgagggaaaccatccgggtgcaaccgagtttacattgataccatcctgggcccattccaccgccagcccccttgtcatggacagcacagctcccttgctggtacagtagggcaccacctccgaaaaccccagatgggctgccatggaagtgatgttcacgattctgcccctgttgggagactgtcttaaataggggtagcacaaggtgcacagcttaaacacactgcttacatttacctggagcaccttctcaaaatctgcgtccgaaacatcctgcgccaggctctttaccgtgattcccgcgttgtttaccagaaaatcaatgccgtgttcacggccgattctctctgttagttcccccatctccttataatcgcttacatccgccgccagatgaatcacattttcatggctggtctccccttccagcttcggcctgccgctccggctgacagcatacaccactgcccctgcctcagccagaacattggccgcggcaaacccaagtccgctggatccgcctgtaataattcccgtcttacccgccaattccatcattccaacacctccatctgatgggaaacacaatttcgttcaatcagctcccagtccagttctccgccgattcccggcttgtcaggaactgtaattatccctttctcatcaatgggaagaagtcccttcatggggaacatgaaatcctcttccggcacaaaatactcaaaatatctgcaattgcgtatggcgcaggaaacgtgaaggtttaccaggtccatgtaattcatggtcgtggtatgaatctcgcactgcattccgaagctttctgccaggtgtgctattttcaaagttcccgtaaccccgcatttccatgacacatcggccctgacaatatccgccgccttctggttgatgacctgcgccaccccccagtgacatcccctggtagtctccgtggcggcaatgggaatatccagggcggcacacagctgggtatatttgttcagttcaaaatcccggaagggttcctccagccattcataccccagcttctccaggtgccttcccaccctgactgcttcttccagtgtatattccgccacagggtcgctcatgagcttcatatccggtcccactgccttgcgtatattctcgtggatttccatatccagctcacagggaccggagggatgggctttataacagttgattcccctggatttgtaatagagagcctcccgcacatactcctgcgggtcctcatggaacagcccgctggcatatacaggcagagaccggcggtaggcgcctatgtattgatagagcggaagtcctgctgccttggcgcagatatcccacagagccacatccaccgggcccggcagatatacaggaaaaaaggtcaggtgccggtcaatgttccacagctcatgccatattttttccctgtcatagggagaggcacccagaaccaccggagcaatattatcgtgcagatagctttccgtcacccggcctgaccgcgctgccagggctgttgcgattccctcgtatccgttatccgtagtcagcttaagcaccaccacatcccaatccatactgctcttgcccttgcgtttttcatcaaacaggcacttatttcgtttaacccaccaggtttcaaattttacgattttcataagctgtctcctatcctttcactgctcctgccatgattcccttgataaaatatttctgcatggacaaaaagattgccagcacaggaatcagggacaggataatggttgctgtcagggtaccgtactgccacgaagcagcctcatcccgcaggaaggtgatgcctactgcaagggtctgggattttgccgtggtgcacagggttctggcgtatgtaaactctccccacaccgagataaatgtcatgatgatgaccgtggcgattccgggcttcacgatgggcagcatcacacggctgaaggtctgccactggcctgccccgtcaattctggctgcttccatcatctcgttgggaacgccgttaaactgtcctctcatgatgaatacggacatgggcaggttggttgcaatatacggaagtatgaggccaagcctggtatcaatcaggtcaaaacgcgactgcataatgtaaatcggtatcaggtaaataacatagggcagggtgatgattagcagaacaaatccaaagaacaggtcccttccccaatactgaaacttggaaaaggaatatcccagggtggctgcgaaaagcacgttgaacagcacgctccaaaaggataccacaacggaattggaaaaatatttaaagaagttgcccagttttgtaaaaatacccgtatagtggcccagatagggatttacaggaagaaaggtaaggactgacgaatatatctcttcatccggctttagcgaggtgagcatcgtccatatgaagggaataatgaaaataaaggatatgacgaacagcaatataaacacggctatgctgccggcgtttttcttaatactcatgccctgttcctcctttttccggtctttttccgtttcacttcatcctcatcctttgtcctgttgatgtaaagattgatacatgacaagatcaggataaccgcccccataaaataaccgatggcagacgcatagcccatctcgtaatatttaaacgcgttcatccatgtgtactggtatagaaccagggtggatgtgcccggcccgccgtttgtcatgacgaagggctgttcaaacaccttcacggactggataatggcccacaggccgcagattacatagctttccttcagattaggcagaataatcctgaaaatcctctggaatgcattggccccgtcaatcttggcggattcgatgatatccgatgggattcctgcaaggcctgccataaagaaaataacaagcattcccatatttttccataagctgacaattacgatggaaaacatggcccattttccttctcccagccagttgtgggcccatgtgtccaggtgcagcatttccctgagcacgctgttgagaaggccatactggttgtttaaaatccactggaaaataatgccggtcagggaaagcggcaccaccatggatacaaatacgcaggtgcgaaagattcccgatcccctgacgcccttgtttaaaagcatggcgattatcagggaaataatcatgatggacgggaaaaacagcagcgaaaataccacggtatttctcagggaatccataaaatatgcatcggaaaacatctttgcaaagttggaaagacctgcgaataccggcttcttgtcaaaggcaaaattgtaattggtaaagctcaggtaaagcgagcgtaacagcggataccccatgtaaacagccacaaatataacccccggagctgcaaacgcatagccgggtatcatctttttcagctgcacgcccacactttttttattccccatattccacctcatcctatttctatgatagcggcaggaaaaccggccaatgcaaagactgtcattgaaccggccctgccggctggttttatttgttcatacctgtgctcaggtcaatggtcgtcatgaacttactcatattggcagaaaactcatcaaccgtggaaccgcctgacagcatcttctgaagctctatctgcatgttggtatccagctttgtgtagtccttgtacagaggaggcgtcgttgctttttctgtgaaatcaagtacggttggccaatatggattatccagtttctcgtaatgggccttcatgggtgacatcttgccgtaggaattcatggaatcagcctggaactgttcctgcaaaagcttatccttgatgaatttaatggccagctcccggttttcagatgccttgggaataacggcgccatgtatgtaggaaacagaaccatgggtatctgtgcccggtatgggcataacgcctacattctctgcccccagaagctcccctgcctcaatccatctggaagccggggcaatgtgcatggctacccttccggccttgaaatttgtcctgtttgcatcggcatccgcgaatacatccgtggtggtatagccgtcctttactaaatcctgccatacctggagcatgtttttgacgggcccggccgtgaagttcaatgtatttccgtctgactcgtacaagtttccgttggctcccatgacgcatgcgtcgtaggcctttaccgccatgttgttgccccagtcaatcgccaggccggtctgtccgtcctttgtcaggttctttgcatattcgtacatctcattccagtctgccggggcagtgacagattggtcctctgccacgtagccggcctcctgcatcatcggtatatttaccacgcatcccaagacttctcccagcagcggaatcatgtactgtactccgtcagcatttccgctttccagaaatgactcgatgaacttatccttggtaaaatccccgttaaagaagttctcgtccgtaaactccaccacataatcattggcagcgtacggaaccgtctcagagcggtcgccgcccaaggctaaatcgcagtttgtctttccctgggaccactccagcatgctggaggtcacgtccacattgtccacctggttatagactacttttacgcccggattctcttcctcaaattcctttgcaatcctctcaaaatcatatttccccatcatccacgcctgaacagtcacccgcagggtctgccctcccccggcctcctttgtcccgctgtctgaagcttcagccgccccagtccccgggtcagttgaagaagaaccgcacccccacagtacggatgatgccatgacagctgccagtgccaacgaatacgccttttttgtcttcataataaacctcctgatacattttagtgaaacgtttcccttatcatattttcatcttactatattattctgccggtgtcaagatgcggaggttgactttattgttattttgcataatttttcgatatttttttgccattttatcattttattaacatatgcttaacatgttttcatattatcttttccgccgtcccgtttatcctcttcgcgtttccgagaagtaacgtttcccttattccgcaaaaaaacgacaaaaaaggggatggtgcaaaaccagattggttacctgattttgcaccatccccttttttgatttagatgcaggaaatccatttaaataaaccgccccatcaaaacctgggacggcggataggttcattcaatttgagacagataatcactaaaaattttataatgcagtttttcgtctaatgataaccttgcaagcattttagaaacatgagggtctttgatttcttttgattgggccgcgtatgcctgagctgcaaactgttctgaccgggcattatcagacaatattgcagggagttcacagctgtaacttaccatattcccgcaccaataggaattgggcctggacgaacggcattcgggctggcctccaagaaggtgaatgagctgtccgattatggaaaagtggtgctgttcaacgatggctatgcgttgaatgacacggcggatgttttgatgacgatcattgatggtccaggattgatacagatactggtgtaccgtggtcatttcgctggcggttgaggctaaatccgccataaggatctgggcgtattgctggttcttttccagaacagcaacgggaggataccagtttgagtgcacaaccggaaaagaatccgggtttgcgcggatattatattgaatattgttcatgggacattctcctggaaaaagctggataggtggttttttaatctttatgagaaagaatccatcggtagaacgccattgaataaaataaatcatttataatttagcttttcatgccgatatatagcatataccttgtgtgctggtttggcatattcacacagggcggggacaaataccggcaaacttgtccagccatggttcaggccggtaatttgttcccatggttctgctaaaaatggcgtaaaagggggaaatatgcaaactatttttatagtcaaccatgctgttgagtgggagagtataatcagcgatgaatggctgagaccggaaggagtaacagagcagccatacaaacagatgatttgcagaatgcatagactgccatgcccccaatcaccggggcatgattactaaggagagtcgatttatgaattttatgaagaatttaaaaattggaaaaaaattaattgttacatttggagttatcattatactttttttaatttcacttatggtatcaattatgagtctgagcaactccggtaagaattttggagatttctacacagtgggatacccggtttccaataagacaaccgatatgtgccgtgctacccagacaggcttaaagtgtatagcaatcagcatgcttacggatgatgctgctgaaacacagaattatattacccaggccaatgaacaatttaatacattgtctccgggattcgactatttacggcagaatttcagaggtgataaggcggtgcttgaccaggcccagaaaattctggaagaggcaaagccataccggatagagattcttgacctggcaggacagaataagaatacagaagcggctgacctgctttttactaaataccagccattaatgctggaatttatgaatttaatgaacaaagctgattctgataccactgcgatcgcggccgaggactattctcagtccgccaaggcccagacctctgccctggtatttctgatcaccatagctgcattggctctggcactgacggtcacacttgccatttatatcacaaaagccctcaccaggccaatcagcgagattgaggaagcagctaaaaagatgtctgcgggagatcttgaggtgtcgatcagctacgtttcagaggatgaactgggcagcctctctgagagcatgaggaccctgacccataattttaaggggattatacaggatatgggaatggggctgtcagctctgggtaatggggatttcagtgtggattctaaggccaaagagctttatgtaggcgaatttgcacagctggcaacatccatgtatcagatcattgacaagctttcatctgtattgggacagattaaccagtctgcggaccaggtggcatccggcagtgaccaggttgcgtccggttcccaggccctttcccagggagccacggaacaggcctcctcagtggaggagctggccgccacgatcaatgaaatctccaatcaggtgaagtctaatgcggagaatgcgcacaatgtcaacaagctggcagatgatgtggggctaaagatgacggagagcaaccagcagatgcagaccatgattgaagcgatgaaggaaatcagctcctcctccagcgagatcggaaagattatcaagacaattgaggatattgccttccagaccaacatactggcgctcaacgcagcggtggaggcggcccgcgcaggagaagcaggaaagggctttgcagtggttgcggatgaggtgcgcaatcttgccagcaagtcagcggaagcatccaagaatacggcggtgctgatagagagctccattctggcagtggaaaagggcactaagattgcggacgcgacagcccacactctgttagagagcgtggaaggcgcccagaaggtaaccagaaccatagaccagatttccagggcatctgaagagcaggcatcctccatcagccagataacccaggggatagaccagatctccaatgtggtgcagaccaattcagccaccgcggaggaatcagcagcagccagcgaggagttatccggacaggcacagattcttaaggggttaatcagccagtttaagttgaaggatatgggaagcgcccccatggtgatgcaggatgttccaagacagatggagccaattcccgtttacccggacggaagtaaatactaaacggaagctttgaccaggacaggggcagcatttatgaaggaaacgctgcccctgtctttttgttttccggcttcagccagttaagtccgcggtttatgtccgcatatactgcatgtccttaatattttcccagaagtagtttacgttgctcttaaatatcagtactatttccaccctgcgtaccttttccgctggttccttatccatgagcaggtactcataaagcatcttgatggcaagatatgcctgtttacaggggtccttgaacaccagattggtaaaggttccttcctttaaggccctcaccgtctcatcaaatacatcgcttgcaatgacgggaatcctgcctgccatcccgcttttctttaatgccctgtacaggacagcgctgcctctggagaacacgcagcaaatcagatccgggggattttccttcaaaatatccagcacgtttttatccagatggtctaattcataatagccgtataaatcctcaacagcatactccttcttctcctgccgcatatattcgtgaaacccttttgccaccagataatgggaatccttataggggtcacctgtcatcaggagaatgcgccggcccctggccaggatgttgcaggcctgttccgccatgagctggcctgccgcgtaataatcccccaccacggttcccaaatggccgcaccggtcctggtcttcggtcacaaaaaccacaggcagccctttatctgtaaagtatctgactgcacagattcccttttcgtctcccggcggaaccgtcagaagtccgtctaactcctcccctgccttcaccttttcacataatgcttccagtgtccgggaaagttctcccttttcataggccagctcctgaatctccaggttaaactcgctctgttccgccaggtacattctgtatccctgccatatatagctgtagaaatacttgctgtcctgatccagtttgggcaggcatactgcaattttcatatttttccgtttcagcatggatgccatggcgttcagcctgtaaccatttttttccgcataggatactattttttttctggtagcttcactcaccccgggctttccataaatcgctttatggattgtattaagggacacattaaaatgctgtgccatatccttcatggtaatctgtgatttcatgtggttttcctcgtcttctcataaggtcaaattatatttaaaacaagccttacgatatatcttatacaatccttcactttttttcaagcccgcaggcagcaattccatagaatgcacagaatccggtttggggaaatcaattttggggaaatccgttttgggaaaatccgttttattccagctgcatcagacagcccataaaaagaggaaagttctgtctggtatctataatcatatagaaaaacggtctgtcaagaaaaacctcctttggttcctctgtttgaacggcactgccctccgatacctcaactgccgtcactgcccctgcttttgtccctttttcgtccacatcaattttagtcttgtgaatcactttgcttatataaatattatcattatctgaatgggccatggaggaaaaatccgctttttggctgtcaaatgcatctttcattccggattccgtcagggactcgttgagaaccacattgtattccactgtaaattttggcaatctgacacagacggttttattacgggtctgttcaagaagatctgtaatcccattttcctttaacctctccaggaactccttcatcgtcataccctcatcaggcaggaccgcggcaaatgcataggcgccgtccccatacggttttaggaatcccctccccaatgtattttcaagatagactgcttctgtggaatacatgaactccgcggactggtgttccccgttttccgcgttaaatgttcctttatgtatctggttctttttatagatatcccgccattccccgtcaaaggacagcgcattgaccaaatacataaccgcgtcccggggcggcgcctcttccagcagtttctgaatcatgccgttggtttccttctttacccagctgttgatgtcatcccttgtgcccgcgtcaaagggagcctcaaatatagatgcatcgtaataattccggctggttttaagaaaatcctcatctatagccaggctgtccctgtccctgaaccatatggaattcgctatgttgacctggcaggcctcgctgttgggcatataatctgtgtatgccttcagataatcattcagggcagccgtatccgtatgcatcatctgttccatctgcgcccgcgtgctgccctccgctccatttgcagtcattcccagggcagagacaatggaaagaggcgaaatcaggcaattgccatgggacaggttttcactcagaagttccagagaaaattctgtaagttccttccgtggatttacagattcataggatggctccataatatccactgtctccacttcctccttgggtatattccgggtaagatcctgggtgcccttatgaaggccatttaaagcacacccggatgtgagcgcagataaaaatatggctgtcagaagcagcccagctcccagatacttccttttccttttcgttatcatttgcatcaaatgtttcatcatattcccctccctgccgcagatatgcggaaaccttatgattactttaccatatccttccacgttttactttaatccctgcttacggttctatgttttttctctgaaggccgcaggaaatgctgcgtacaggctgcaaatgctctcttaatatacttcatactttttttataattttattagcactcacctcttgacagtgctaacaatcgtgctataatacaagcataaagcaaatgaaaccaaacagttctatgagcgaggaggatataacgatgatgttaataccaagaagaaactacggacttaatttatttgatgactttttcaatgacccattctttaccagcgcctccgaaaagggtgaggaggccaagaagcttccggtgatgcgtaccgacatcatggagaaggatggaaactatattttagagattgaacttcccggattcaagaaagaggatatcagggcagagcttaaggacggatatctgactgtcagcgctgatataaccaagtccagcgagggcaaggatgacaagggtaccctgattcacaaggagcgctataccagttcatgtaagagaaccttctttgtaggcgagcagattcgccaggaagatatcaaggctggttttgaaaacggcatactgaggcttcaggtgccaaaggatgcgcccaaggtggaggaaacacccaagtatattgatattctgtaatcatcattgaatgcccaactccttttatatatattatccctaataacggacacagccgtgaatcccccatcccggctgtgtcctttttagttcttttatattctttctttcatcctatgctttccacaaaagccggtcctccttgatggttgccagcaccctgatatttcgtatctcatctgcccctgtttccagaggattctgttccagcaccacaaaatccgcctttttcccgggcgtgacggttcccttctcattttcttcaaaatactggtatgccccgttgaccgtcactgccttaagcgcatcccacaccggaatacgctcctccggtcccagcaccttaccctccctggaacgccggtttacggcgcaccacagagtctccatcatgtccggcataataaccgggctgtcctggtgcagggtgaaacagatgccctccttcagggccgatgcagccgggctgatgcgtcccgcccgctcctgaccaaaattgcggacgtggatgtccccccagtggtatacatgggccaggaaaaaggagggaatgattcccagtctctttacccgttccagctgatccagccccagaagctgggcatgaatcattaccggacggatatcgcccctgtaaaaaccaggcttcctgctgttcccgctccccagttccctgtaaactgcctccagcatatccatatactgctctgccgccctgtcaccgttgcaatgggccagaagctgcatgtcttccagctctgcctttaaaatattttcctttacctggctgtcctccagggtattataaccgcaataatcctcttttgttgcccgggtccggggaaatgcatccgcctgtgccttttcctctgcatccggtgtttccggcagatagggcgtacgcatccatgccgtccttccctggggcgatccgtccaggaacattttgtacccgcctatcttcatatgccccttatagttctttatatggctttcaaatgccgtccgtgcagcatcgctgtcccgtatatccataaaggaaattaaatccagctttaaaagtcctgatttcagcagcatctggtacagcggcaccagctggcttgccatcagtccctcctggaccgtggtgattccataggaagcatagagctcctgggcgcggccgtaggcagtcaggaaatcttctgccgacggcatggggatgcgtccctggaagcccaaaaatgcattttcctccatatatccggtgggaagcccgccctccatttctatgacgcctccctgaggcgcctgtgtctgtccggtcacacccagaaggttgagagccatggtgttaaacacccccatgtggcctgactggtgtttcagtatcaatggattctgaggcgctgcctggtccaggaccttcctgcgggggtggctgtgttccttcaggcggttgtggtcatatccggacgcagtgacccattttccctctggaatcttcttatcttcaatgtattgccggatgcatattatcatgtcctcaaaactgcccgccccgcccaggtccacttccattgtgtggctggcgcaggccgtaaaatggctgtgggaatctataaagcccggcatcatcacccttccctgaagatccagcctgcgggccttatcccctgctctttcctttaccttttcccatgttcctgtctccaggattcttccgtcttctgtcagcacggcttccacctgggggcacctgtcctccatggtaagaatggtgccgttatagtaaagcgtctgcgccatgtcctgtcctcctgttctatgaattgactttccctgtttttcttagtatagtacctatattatcactggtacagcgtatcgcaggtccttgtgcacacggcgcccgctatccgcagtactaaaagtatgcacataaaaggagtttcttatgatatgcaggtgtattacatggattaaaaagcaccctgtcctctcactctttttcctgatactgatgtatctggtgattggagccacagctcccttctatcactataagccaatttcccaggaaacacaagatacagtatcggctgagaacttctatcaggagggagacagccgggaccgcgccatgatactggaaaccaatcagagcgcctgggatgaacggatgcgcctcatgaacctggccagggaacggattatactgtccacctttgatttcagggatggcgagagccccagggatctgatggcagtcatgctccacaaggcggaccagggagtcagcataaagatactggtggacggtttctccggcctggtgcgcatggagcccagcaagcttttttatgccctctccagccatccgaacattgaaatcaagatttacaacaaaatgaatcccctgtttccgtggaaaacccagggaaggatgcatgacaagtatgtgattgtggatgattatggatatatactgggcggccggaatacctttgattatttcatcggttcctatcccacggattccagaagccatgaccgcgaagtcctggtctacaatacagcccacggcacagacaggggaaaggacagctctctgtatcaggtggaagattactttgagcaggtatggaatctggatgtgtcctccctgttccatgacagcgaaaagaccggtgacaggacctctgtccggaacgcggcggccatgctgagggagcggtataaggtcctggccatccaatatccggatctgtttgacagtgaggaggattctgccggctgcaccgccgcgcccggccagcccggctgtccggccctgcccatggattcaagtatcaacgatgacgattaccccgccgccccggatatcccggacgccccagataccgctccccccctgttcccggccttatccctgaccgccaatcagtcaaaggccctggagtattacggttccaacacggttcccacggggaaaattaccctggtgtccaaccccaccggcatctacggaaaggaacccgtggtctttcacaccatgtctgttcttatgaaggacgcaaaaaggagtgtgctgatccacactccctatgctgtattcaatgactatatgtacgataccatgaaggaaatcacggctcgggtgccggtgaccatgatgattaattcagttgaaaacggcgacaatttttttgcctccagcgattatcccatgcacagggacgcatttggggatacgggcatggagattctggaatatgacggcggtctctcttatcatggcaaatcccttgtcattgacgatgagctgtgcgccgtgggctcctacaatttcgatttgcgcagcacctatctggacacagagcttatgctggtcatccagagcccggagctgacagcccagctggaagaatacatggtctcctaccagaaggactgccgacgtctcctgccggacggaacatatgaaataccggaacatctgaccattgcagatgtcccggcgtataaaagggcggcctggaaggtggtgggctttgtgatgcagcccttccgcttccttatataacctttttatccctccattttcctgtgaggtaacggctgaaggatatgacataattggcaatccagcccatggggaccgcgtaccacacggctgccacaccccatatgggagcaaaatgaaaggctgcgtagacacgtatggtcagattcaccagattggcaatggtaaataccagcacatccccggagcctcgcagaactccgtccgtacacgccttcataccgatgaacacaaagaagtaggcgataaaggacaggtatcccgtgcccgccccataggcttcccggctcatgccgtctcccaggaaggaggttatgatcgggccgttaagaagcaccactatcacggctatgatgacggagaaaccggccacaatgccgtagctggccctgtacccctccttcacccgctccatcttcccggcgccgatgttctgggccgtgaaggtggctacggcgttgcctgttgcaatcatgggcaccacgcagatggactcaattctgcttcccgctgagtaaccggccagggcagcggagccaaacccattgaccacggactggaccagcagcattccgatggatacaatggactgctggagaatggacggcaccgcgattctggtccctgcctttaacatgctgctgtcgtagagcctgaaaccatccccgtcctcctgctcatatccccttaattttttcatcaggatgccgaaggatatcagggcggatactccctgggccatgacagtggcaatggccacaccgtccacccccatccccagccatgtgacagatataatgtccagaaccacgttcaggatggatgaaaatatgagaaggtacagaggcgtcctggaatcccccatggcattgaatatggcggcaagaacattgtacataaacaggaaaggcattcccaggaagtaaattccaaggtacagctttgcctggcccatgatattggccggtgtcttaagagactccagtatgaggccgttcaggtataatcccgcgctccccagcagaatgctcacaaagaggaaggtgatcagggccgtggaaatggaggttttcatttttccgtgctgcctggctcccagatactgggatgtcaaaaccgacgcgccgtttcctccccctatggctatcataataaacacattggtcagggcataggaagcacccacagccgccaacgcgtcctcgcccacaaaattgcccacaatcatggagtccgccatgttgtaaaactgctggaacaggtttcccagaatcatgggaagggcaaacaggagaaggcggcgccccggactcccttccgtcaagtcaatccgcttttttatctgctttccctgttcacggctttttgctgcactctgattcatgttcttccctcaatcattcatttgtatggatacacttcttaaattcctcaatcagctccccgaagaaaccaagggcttcatccaccggccgggtggtggacatatccacaccgcagagcttcagaagatcgattggcttcatggagcagcctccgcttaagaacttcttatacccttccagcgcgcctggttccccgctcataatgcggctgctgatggccacggctgctgagaatcccgtggcatactgatatacataaaaaggtgtatagaaatggggaatcctctcccactcataatcaatctggcggtccactgtcatggccggcccgaaatagtctgcattcagctggcggtagatactgcacagactctcagccgtcaggctctcccctctggccgcctttttatgggccatatcctcaaactccgcaaacatggtctgacggaacagggttcccctaaagctctccaggaaatgattcagcagatatgccttttcctccctgctgcctgccttcttaaggagatggcgtatcagaagcgcctcgttgcaggtggatgccacctctgccacaaatatcttatacccggcataggtaaacggctggttcctgtcggaataccaggtatggatggaatgtcccatctcatgggccagggtaaacacatcgttaagggtgccatggaaattcagcagcacatagggatggctgccgtaggtcccccaggaataagcgccgctgcgcttgccttcattttcatagacatcaatccaccggctgtcaaatccctgctttaacaaggacagatattcctctcccagcggagccaggccctccagcacaatggactttgcctcctcataggtgtaacggcggtcagccgctgccaccatgggtacataaaggtcatacatgtgaagctcatccactcccagcacatccttccgtacccgggtgtattcatgaagcttcacgatattttcccgcactgccttcaccagattgtcgtagaccagctcaggaacctcgttgtcagccaggtaatactcccggctggaggcatacttctttgcctttgcgtagaatacggcctgcttcacattggaggaaaatgcagctgccagagtattggaaaactgttcatacacactgtataacccctcgaatgcatccttgcgtatcctgcggtcctggttctccatcagggaaatgtaattgccgtgggtaatctggattccctccccactctcccccgtgataacggggaacttcacatccgcattgttgaacatggtaaaaatctggctggcgccctgggtggcgtcataggactgggccagaagctcttccatctcgccggacagggtgtgatcccgcctggcaagaatgatttccagcgcccgtttaaaatggcctatgccgttatccgccgccatatactgttccagaagctcccggtccatggacagaatttccggcaccaggaaggagctgttctcagctgcccggtaggacagcgtctgggccctggaaaacatatcctggtatctctgcacggtggtatcctcgtcggaacgcatcctggcatagacatacagacgctctatcttctgggaaagcttgtcgtcgaacaagaggcaggcatacagggtatccgcggacccggccagtcttcccttgtaggaagcatattcgcttatttccccggaagcctctttaaacatctgttcccactggctgtcctccgccaccatatcctccagtttccaggtatacttactatctgcttcgcttcgttttttcatgcagaacacactccttccaaatacaatattaaatgggcgctcaattaaatatacattattttaaattacacgctaaattaaattcgctgccagaggaaccacaataaccgtcatcagccctgccaccgcaatggagagactgctcatggcgccctcgatttctcccatctccagggccttggccgtccccaccgcatgggcgctggttcccatggccaggcccttggcaacgggatggcggacctttaaaagctttaacacggtctccccggccatattgcctaacacccctgtaagtatgatgctcatgaccgtcagtgttacgatgcctcctgcttcctcgctgatacccattccgatggccgtggtaatggacttgggaagcagtgtcacgtagtggacatgggccatacccagcaccttgcacatgaggaaaatactcaccgcactggtgaccacccccgatgtgatgcccaccgccacggcgtcagcatgtttcttcagcagatgcagctgcttatacaatgggattgccagacagaccgtggccggcgtaaggagccagctgagataggatgcacctttattatatgtttcataatccattcctactcccagaatgcaggcaataatcagggctgccgacaccagaagaggattcaggatagccagttttgttttattcttaagccagcaggcaaacagataggcgcctatgctgagcacaagaccgaaatattgtgtttgttccagtatcaaccgtatgccttccctcatgtcactgctcctccccgctgtgttttctgcccatgacccactgggccatgcatccggtcactgccatgaccagaagggtggatattcctatgattatcagaaagggcaccagaactgccttcacctctccgatacattccacaatcccaaccgttgccggtataaacatcatggtcatggtatccatgagaaaattacccgtgccctccacgctctccagcttcacggccccgcacatcagggctgccagcatgatgaacaggccgtacacaccggccggcacaggcaggggcaccacatgattcaatatctctcccgccagggttatgcccaggataattcctatctgttttacatatctcatatcttttgtttcctcctgctgcgttagagcgtgttttaagccatgctccgattatgtttgaaattcgcacggcctttattctaccactgcatttttccataatcaaccagaatacagataaatacacaagaaatacaatcttgccattgcaatgaacgccttactgccctacaatataggaaagtccaaaggtaagaatccaggaggccgcgcccgcatgaatatgatgcataccaataccgcacatacaaatctgactcgtacgaatatgactcatacaaatatcacccatacaaccacattatcccggaaagaacaggaagatatacgcaggatttcggccctgtgccgcctcacggacggcctgagtctttcctgccctgaggacggggatgaatactggcttctggaggaggacgccactgcggctgccttcctggccgtgtataaaacagaggaaacaatgtgggaatgctatgctttcacacacccggattttagaagaaagggatatttttctgcgctcctggaacaggtctgccagtacagcgaggccctgggcgagccggaactctgccttgtaaccgacaacaagtgcccggcggccacggccgctctccgggaactgggggcagagctttggaatgaagaatatatgatggaatataatacagcagccgattcttctgaggatggaaaatccgcctcccacgcctccctgcaaaacagagcgtcggacggatcggatggcagaaagcaggatatggaactggacatggacatccgtccaattccggaagggctgctcatctgcgccagaaggccgggggaccatccctccccggacaaggatggcataacttcccaggacagggatgacatcaccgcccggaacaaagctcacagcaccgcccggagcaaagttcacagcaccgcccaggataacacctccggtacagacagcacgccggacgcctgcgttacctgccgtctttccctgaacagcaccgccgcatacctgtacagcctggagaccgctccggccctgcgacgccgggggctggccagctgttttctcatacagctcatccgctatctggagcgtgagggtatccggcggatctgcctccaggtatccggctccaatgaacctgccctgcatctctatagaaaaacagggtttcgcataacggaaaccctgtcttactatctctactagagcctgtctgaactatctgatttacagtctctgtcagtccctgcgcaccgtgacgccctgggcttcaattttcttgcgtatctccagcatcttcacgtctgtgccggcaatgacctccgcacactgcttcagttcctcgctgatttctccgttgtcgtcaataaaggacttcttatactttaactgatggtccaggctggcccagaagtccatggcaatggtacgtatctgcacctccacacggataggcttcttgctgtcggagaagaacaccggtatctcgataatcatgtggtagctccggtatccgttgggcttgggattctgaatataatccttcaccgcaatcacctttacatcatcctgccttatcagcatatccgccacttcatagatatcatccaggaaggaacagataatcctgattccggccacatcatccagatttttctccatggactccaatgatatctcgaatcccctgcgctgcagcttttccactatgctcttgggcttcttcacacgggactttatcatctcgatgggattgcgctggttctttacggacagctcgtcgttcaacacttccagctttgtcttgacctccctgattgcacaggtatacctcatcatagcctgctggaactggcgagcctggtcaacccacatctccggcacctggaccatatccggtacattgacgatggactgatgaagctcactgttgggattgatgttaatgttcatcggttcacctcattatctatggtttactgctgccgcagttttttataatgcctcgactgcctttacagcctcatcaaaccacggcatttcaagatattccacccgtcctgcatccaccatctgggcaatggcaggatcaattggtatctgagccaggaccttgatgccgtgctctgccgcgatttcctctacatggccttctccgaatacgctgatgcgtttgccgcagtcgggacattccagataactcatgttttccacaactcccacaatggggatatccatcttctttgccatgttcactgctttggctacaatcattccaaccagttcctgcggtgaggtgacaatgatgatgccgtccacaggcagggactggaatacggtcaggggtacatcgcctgtgcccggcggcatatccacgaacatataatccacatcctgccataaggtctcagaccagaactgtttcacggctcccgcaatcacagggcctctccagataaccggatccgtatccgtatccagaagcaggttggcggacatgacttccacgccttccatggacttggccggaagcatcagtttgccgtcaggtgatgtggccacgccctcattgccgattccaaaggccatgggaatggacggacctgtaatgtcagcgtccaggacagctgttttcttgcccttgcggttcatgctcactgccagcatggaggtgactaaggacttgcccacgccccccttgccgctgacaacgccaattactttctttacggagctggccggattcagtgcctccaggaactcacttttatctgccttgcggctgtcgcagtttgcactgcaggagccgcagtcatggttacattcactcatttttttgttctccttccaatatttctaaacctaattttcattataaatccatttcacaagattgtccattgttttctggctgccgtcactctcctgccgtcactctccgctgccatcactttccaccgcggccagcagacgcctgagggcaaatcccggccgcctgaccactgcttcctccaacactgccttattggaatccgagtgttccacttcccgggaaaaccggtgggccccatccgcaaaatccaaaaaagtaagcctgccgccctggtctgtccacagagcctgggccagctcctcaatcagcagggtggctgttgccgccatcttcatttttccatagggattcccgttgtaaacagccccgcagaaataggtgaacacaaaatacaccatgagctgttccttaagcaccggcagccgttttccaatctcactttccaggaatgccctgcgccgcgtctcatatgcctgcctgcccttcccgtaaagagctgccttcatcccggagacaaaggccggccagtcctttcccagaacctccatttcggaaaacagggaaaaggcctcctccatgacctcatacctggaacaggacgccctgtcccagcctgaaggaagccgtctgcgccccgccgccctgcggtaccgctctataagcccgtccgcctcatagagccgcccttttctgatacgggcctgaaggtcgtgggccagtcccaggcacatggatgtcctgtcttcccaagaccaggtacggtctctgaggatatccagtgccagttccctggcatccatcagcttggtaaagagaaagaagtcaaagtcctcatatgtctcctggcgctcatcctccctggtaagaaaccgcaccggttcctcacagcccaatatgattgttgccgcctctatgcaggaaaggcagagcgtcatttccctgcatccctcaaattcttctatatgcctgggatatgtgcggcaggtacggcacaggtactccggcccggcctcactgtagatgtcgcatagattttcctcatttaaaaacgcgcaccgtccatggtactgcttaaaggaaccttccttccaatgaatggaattatgaagcctgctgccaaagggtccgtccatgttcctgtacttcttaagggatgcgctgtcaatcatgatgccccatcccgcgcagcaggtgtccggacagccggacgcagtacatttaaaatgattgtaatagtggggaaatgtgtatatcatttgtacctccttataaatgctgcagccttcccccgcagggcagcgcttcatagatggtgcatcccatctgttcttcaaaataatcctttatttccagcacccttttccaccggggaatggtgctgggatgaaccccgtaccggatggtcacgtccacgaacctggtttccagaggacagaatcccgtaggcagggccaggctgtcgcagagctgtaccagacggtcataatcgtcatagactgccccggaaatgaattccttcataaattcataatcctggggcgtcacgtcaaactcaccaatggacgtgcctatatcctgtatcatgaacgcatggctcatacagattctggcagcctcctcccatccgtgttccatgcatctgcggtatccgtctaacagatggcgctccgatgtccggcccgcatatctgcctgtatcgtgaaggaggcccagcacataggcccggtcccggtccatgtggctgcacctggaagctatgctctcacaggcagctgccacgtacagggaatgctccttccatggtcccggatttaagtccgctgcccacttaagctctttatttgccctctctctgtccggtatcattgtgtccctcctgctttcattcttccggtttcccgccttcccaggcagaaaccccctgttgttttaacggaactccgtttattgtactaccaaatcatacagatatctaccttgtatttaagatttaacatgggaatcccttacaacataccgcggcatatctgagacagcaatgtcccgccgcagcaaatgcttggctgcggcgggacattgtatccatctgttattataatctggttccggtccttaaaaacggtccgggcgctcctattttgccaatgacaatgcctccagcacgtcctccggacggatgggaagcttgtaaaactgcctgcccactgcattggacactgcgttggctatggccggcgccaccgggacaacagcgcactctccgatggacttggctccgtaaggacctgtctcctcctcggagtccaggaaatccacggaaagcttcggcatttccttcacgttaaggatgtggtatttcttgaaactgctggtctggttcctgcccgtgctgtccagcttcatctcctcgcagagggcatagcccagacccatggaaataccgccctccagctgtccggtgatgcccattggattcaccacccgtcccacgtcatgaactgcggcgtattccagaaccttaatcccgccagtgaccgtgtccacctgcacctttgcaaaatgggctccgctgctcatggggcctgcctctgagtggaacatataggagcagcttaaatcctcctgatgcttttccctggcatgaaccgcaatctccttcatgctgacaaacttcctgtgaatatccacgcaccacactgcatcgtcgtggaaatccaggttatccgtggtagtatccagaagctctgccgccagtacagctatcttgtcacgcatgatttgggctgttttcactgccgcgtggccgctggtgtaggtgcctctggacgcgtaggctcccagatccgacatggccgcgtccgtgtccgtctttatgtaggcgatatggtccagcgggatgcccagcacctcggaaatcagcatgcactgggtggtcacggatccatttcccatatccgaggttccggtggtaaacacgatggtcccgtcctcgttcatcttgatggtgatgcccgtgatatccggcatgaaggggaacatggaagttccgtgggaaccgcaggccatgcccactcctatgaggtagcggcccttctccttcctggatgcctccatctgctttttggcctcgtaccagtcgatgagctcccgtccgcggaccacgcagtccttcaggcggaagttgccaaaggattccccgtcattgcaggccgcctcaaagggatccgccagattcttaaggaacacgtcagacgggtccaggcgcaggctctgggcaatctcgttcatcatggacgatacagggaaaaactgctgcggggaaccaaatcccctcatggcggaagccaccggcgtattggtatataccggtattccccggcatctcatattgcgggtctttaagagcttatagaacttgccccctgccgcccagcacacggacatggtggcgctggtgtgggcgcctgcgtttaagatcatggtctcatcggctgccgtgatggttccgtcctttttcactgccatggtcaaatccaccttggcagcatggcgggtgcgggtacagcagaattcctcggtcctgttgtagaccattttcacgggacggccggtctttatggctaagagggctgtcaccggctctgtgaccaggtcaatcttaccgccgaagccgccgcccatcaccggactgataacgcgtatcttgctcatgggcagctcgaaaatacgctgcagattgattctctggccaaaggcatcctgggtaggcgtccacacggtcagcttgccgcctgcatcatactccgcaatggagacatgtgtctcaagggaacagtggttcacggccggcatctcgtatctgtgccggaaaacatggtccgcatcccttatggcgccatccacgtcaccgccggagttattggattccatgatgatattgccgccctgatgaatggggtaggcgtcctccttcatggcttcctccggatccagatagaagggaagctcctcatattccacagagataagggaaagggcttttcttgcaatctcctctgtgtcggccgccacagccgccaccttatcccccacaaagcggacggtctggtcaaacaccagctcggagggattgatgtccttatcctcaccgtttccattgtaacggttcttgggagaatccttgtagcagaccacggcatggaccccctccagagcctgggcctgggtggtgtcaatggacttaatcctggcatggggaacgggtgaaaataaaatcttggcatacagcattccgggcagcttcatatcggccacataccgcatctgtcctgtcaccttcatggcggcatccctgaccggcacgctttttcctatcattccattcttgggtatctcacatgacatagctatcttccctcctttctcatgacctgggccgcacgcttaacagcctccagtattttcacgtaaccggtacaccggcacaggtttcccttcatggcttccttgatttcctcctccgttggatccggattcttatccagaagagccttggcagccatgaccatgcccggagtgcagaaaccgcactgcacggcgccgcagtcaatgaatgcctgctggatggggtgaaggcttacatggccgggtgatattccttcaatggtttcaatggccttccctcccatatccattgccctcacggaacaggagttgacagcctcgccgtcaatgatgaccttgcaggagccgcagtcacctgtactgcatccgcatttggtgcctgtcaggtccataacctcccgcagggtgtaaagcagggtccagtttttttccactgctatattataagttcttccgttaacgtttaatgctactaattccatcttgacctccctatcagttatattctgcctctatgcctcttcctttttttcgccgggaagaatgatattcagtaccagggcagtgatggccgtaccggaaataccggtaaacagcgtaactaccgtggagggaaggaacgcaagggttcctgcggcctgggcaaagttgccgccgattcccactgccgccgccagggcgatgatggtaaagtttctcttgttgttctcgtcaaagccaataaccttgataccgctggcaatgatgtttccaaaggtaaccagcaggatgccgcctaaaaccggattgggaatcagggccagcacctgggagaacttggggaatatggccatgaggccgaagataacgcctgcaatggctgttacaaacctggaagccacgccggacataacctccacgccggagttctgggccgccacacacatgggaagggcgttaaacagggtggagaacacgccgcccagggcgtcgccgcgcacagatgcctttagggtttccttggtgggaaggccctcgtccgtggcagtgacaacaccggtggtgttgccggagttctccatgatggttgcaatatggatgataaatacggtgattacggcgcccagatttacggtcattccaaagttaagaggtctggggacagctacccaggccgcgcttcccacctgggagaaatccaccattcctgttacggaacagaacacataacctgccaccatggcgatgagtactgccaatgactgcacaattccctttgcaaaatggtcgataatgacgcagattgccgcgatggcaatgccgattaaaaacatcttcatggcgtccggtcccgtggggttgtaatccaccatgtcgttccatgcattgagaatcagacacattcccactgccagaaccacagaaccggttactgcgggcgtaaagtatttgtacagtttgtcaatcacaatgggtcccagcaggaacaggagcagcgtgccaagacaggcagcgccaaaggctcccggaattccgatgttgggatcattggcaaacagcaccattggcgtgatgagggtccagcttcccgcagataccaggggcagcctggcgccaatctgaaacttgccgatgcggattcccagagactgaatcagcgtggtgatacagcaggcaaacaatccgcactgtatcagaaacgccgtgtcggccgagttcattccggcaccgcttgccagcatgatggagcctgtcatagaacctgtaaagatagtaaacacgtattgaagggcccaaggtacagccttaccggcgggaaccttgtcgtcaaatccatattgcattttcataaaaatatcccctttataagtttttatacatcagttgtcaagttacgaaatactagaatcttgcctctttcatgatcctggacattttagccattttccttcccaggatttcacagtttctgaatccgtccgggtcctctatctccgtggatccgtccccgggattccacagcatggggccggaatacatccctgagccgcctgtacagaccgtcattccctgtgtcaggaaaaagttggtgatggaattcatggtggcctcctggccgccgtttctggtgccgcccaccgtgattcccgcccctaccttgtgggcgaagaaatcaggatcctccactcccttaagccatgcggagcggaaccggtcaaagaaggtgcacagctgggccgttatgttcatctcgtagaccggtgacgcgataatcacgccgtcagcctcgtaaaatttgtcgtacagctccgtcatatcgtccttgaacacggtacagcggtcggatttatcccgcaggcacttgttgcagtggatgcagaaattcattttcttggcgcggagctccaccagctccacctccacgccttcctctgcattcttagccgcttcaagggctgtctccagcgccttgtagcaggacttgcggcgcgggctgccgcagattcccagtatctttaccatattctcttcccctttcccggtgcagcgcactgcaccgtataaaatctatttatctcccaaggctgccaggacccggtcgggccttgccggaagttcattgatttccccgcggaccgcattgcagatggcattcaccacagcgggagccgcaggaaccacaggacactcgcccagggcctttgccccgtaaggaccgtccggttctccctgtggggtttccacgaaatccatatatatctttggcatctgggaggcccggagcaccttgtattttttcagtgtctgtaccagaggttttccgtccccgtcataggccatatcctcgcaaagaccgtaacccagtcccatctgtatggcgcctgccagctgtcccttaagcatcaggggattgatggcgcggccgatatcgtggaccgccgcatattccaggggccttacctctccggtcagggtgtttacttccaccttggcgatatgtaccccgtaggaggtggctccccgttttgcctcgtaagtctcggccaccatcagctccctcatgctcacggactggcagtggaccatcacgtcgtgaagggaggcgtttttctcctcattcttcctgctccaggccctgtcgtggtgaagctcgatatcatccggctctgtctctaacagcttggctgcctcaacctgcaattcccgtttcatggcctcagctgtcttcttggctgcgcttcctgccacgaacacgccccggctggaataatccccaatgtgccagtggaccacatccgtgtccgctgccaggcagtcaatccggtccatgctgattcccagcacctcggatacaatctgcatctgcatccccagcgtatcggtacccatatcatgagagccggtgtaatagatgcaggatccgtcctcattcatcttaagcatgggggttgacacatcccggtgggcgcctacacagttgttgccgtggactcccagagccaggcccaccccaatccgtatatcctgatttcttgtagcctcctgctccttcaggcaggcttcatagtcaatgagctccagcgccctctttaagcagtcctttggcctggaattgccgtggggtttgtggaaaatagggtcgcagctgtccgggtccaccatgttcttcatctgcagagccgccatatccatgtgaaggaaatccgcaatcttctgcatctgtctctgccatccgaaatagacctggggcgagccgtaccctctcatggctcctgctatctcggtgttggtgtacacgggctggcactggaaacgcatgtggtcaattttatatgccttaaagaccttgtgggacatggcgccgcttacattcagggcgctggaagcataggctcccgtgttggtgtagactttaaaatccactgcctttaaggttccgtctttcatgaaccctgttttaacatagtttacggaagcgtggcgcacacgggtggacagaatgctttcctttctgttgtactccaccttcacaggctttcccgtcatctgggagagcactgccgccacaggctccaccgtcacctccagcttgcctccgaaggccccgccgatggccggcgccaccatccgtatcctgttataggacaggccgaagatacgcgacatgataacacggaaggcaaaggtgttctggcatggactgtatacggtcagctttccgttgggagcaaagtcagctatggcaacatggggctcgatggccgcatgatgaatggcctgggtggtgtaacggtcctcaaatacataatcgcactcctgaaaggcctcatccacattgcctgcctctgccctggagatccccacaatatttcctccctcatgaatgggccaggcctccggctttatggcttcctccacatcggtaatcaccgggagggcttcgtactccaccttaatcaggtttactgcctttttcgctatgtccggggactccgccgccacggcagccaccctgtctcccacaaagcgcacggtgtcgtcaaagatacgttccgtgtccggaagcttgtgctcaataaaacggaccgcgctgttgtaccgcacctggggcgtgttcttgtaggtggcaaccgcctttactccgggcagcgcctcagccgcggaggtgtcgatgctctttattctggcatggggaaccgtgcttaagagcacctttgcgtagagcattcccggcagttccatatcacctacatatatcttctgtcccgtcacctttaaggcagcgtcgcctatgggtctcggttttccgattacagtgtattcattgtccattccggtttcctcccatccgactggcagccagtaaaatggcctttactatattgtcatacccggtacagcggcacagattcgggtcaatggcctttctgacctcctcctcccttgggtccgggttctggtccagaagggctttggctgacataatcatgccgggaatgcagaaaccgcactgtacggctccggcatccacaaaggcctgctggattgggtggagatggatgccgtctgaaaggccctcaatggtctcaatggccttaccttccagattgacagcctttaccaggcaggagcgggtggctacgccgtctatgatgaccatgcaggctccgcagtcccctgtctcacagccgcattttgttcctgtgagcctgagtccgtccctcagcgtctttaacagcgtccagttctttcccactgccagttcccggcagaccccgttgatattcaggctaattgtctccatattgtatttcctttcagaacatcatttaacttgttgcttgaagaaccggtatgcattgtcaaagaaaatcttctgcacggccgcttccccgatgccgtgttccaccagatagtccgcaaaccgtcccaccccgtaaggtgtgttcagatcggggtcgcaggtaatctcgccgtccatatccccgccccaggctatcacgtcctctccgcctaactccagcatgtggtagatgtggcgcagcagatagtccttgctgccattgtcatcgtcgtctatgaaccgtgagaacaggttcaggccgcacaggcctcccctgcgcacaatttccttaaactgcgcgtccgtaagattcctgggatggctgcagcaggccctgacattggaatgggatgccacaaagggacgctctgctatgtttaacaggtcctcaaaccctgcatcgttgagatgggagcagtccacaatcatgcctacctgctccatcctctttactgcttcctttccaaaggcagtgagcccggtatcgttgtttggccctgaacccagctcattggccccgttccacaccagtcccagcatcttgaaattcaggtcagcaaagcggtttatgttgtccagatccccgtttaacgcggctccgctttcaatggagcggataaaggcccattttccctcatccagtatccggtccaggtccgtgattttctccaccagttcagcctggcctcctgtccttctcacctggtcgtccatgtactggtggtaatccagtacgaactgcactgcctcctgcccgcggatatcatcaggcacgaaaacagccatgacctggacagccttctggaatttctccctgtccctgagggagaactgggtggtgcagttaagataatcttctccccgtttttttaattcttctatggtgtcgcagtgtaaatcaaacagcctcatagtatgtattcctttctctctggatttgcctgtgccggttatgtgtcagagcccggccatcagctccagaatgccagggccttctcaaactggtcctggggggtggtcacatagcccacaggaaccttgcatccggtggcctcatacattttctttgccagttcctccccgaaagccccgcagacctcaatggctccaaagccttcctctcccagacgtttggccagcgccacagcctcttcgggattcctcaccgtgaggatgtgtgtctcaacctgctccaggtccaggcgcgccatgtccttttccgggtcatagcccgcgttcatgattaccatagcccacttcttcattgccataatcagtttcctcctcgctatgttctctgcgtaaccagttataccccggcaaacagggcaaagcgtgcggggtgaaccgtacacgcttaagccctgtctgccaggggactatccttttagtgctcctatttcaacagcgccttcatgactccgtaataggattccatgaccttgtttaactggtctatctcaatgtattcgttgatggtgtgggccagtgtctctaaggacggacctacgcctacggaacggattcctgcctcgcctgcatagtggctggcattggtgcagaaatcatagttggtgatggttgggttcaggccgatttccttcatttccttataaatgttctgtacccagtcctcgttcttgtcgaagagccatcccgggaagaaacgctctgcctcgatggtctcgccggtccagcacttctcctggcctactgcgtaggaaacctttgcctttaactgcgggtcatccttcatcatgcggtccagaagctcctgtaagggagccagtacgctctcctttgtctcgccggtgagcagacgtctgtcataggttgcgcggcagtaatccggcacaacagaggcgcctgggtatggggaggatttcacatccaccagctccaggatgccgtcgcccagcacatcgtggtgaggaggtgtcagcttgttgatttcctcgattaccttgcacatcttatagactgcgtttacacccttgtgggggctggcggaatgggcgggaacaccgaaggtttccaccacgatctcagcacggcctctctggccaatcttcatgttcagctgggatgcctcgccgataataacataatccggcttcacataagcgctgatttcccttgcagccacgccctcgaagcactcctcatggacaacgcccgcaacgtagatatcgccggggaagtcgtagtctgcatcctctgcatagtaaagtgctgctgccagcatggcggacagggcgcccttcatatcggaggttccgcggccgtacatcctgccgtccacaatctcagcgccaaatgggtcgtgatcccattttgtcttatccggtacaggtaccgtatccatatggccgtcaaagaggatcttcggacctggtttggatccctttatgtggcagatacagttgccgtatctgtccacgtggatatcggtaaatttgtgctcgtcacagaatttcttcatgacgtccaccaccaggttctcctggccgctgtagctgggagcctgaatcattttagttgtgagggccagaagttcctctgcccttttctcatttaacattgacatttctttttcttcctttctattatatactgctacttaaccaactcgtagaagtcctttgacttctgtgccagttccagatccttttctgtctgaggagccagctctgcggtgagggcacctgtgggacatacgtccagacagagaccgcagcacctgcatttatccatatccactgtcatttccgggaaggtgagcttcctggcgtcatagcagcagacggtctcgcactttttgcagctcacacatttctttgtggtgccgtcttccttaaatggtgtgaaatggaacttcagaccggaaatatgctcttcactggggaagtttggatgggctgccctgtttacctcctggatggagctgtatcccagctctgccaggcgctttgacaggtcatagcacatcttctccacatactccacgcccttaaggataccggccgtgcagacgcctacacccatggctcctgccatcatgtactcgatggcgtcatccgccttcatgactccgccggacgcgtacaggttcataagctggggattctctttggcaatctggtaattgtagcgcatggcgatgggcctcatggcagcgcctgtcatccagccgaagccgtccccgctcatcatctcaggagcagccttctcaatgtcaatcttcagtgtgggtccgatggaatcaatggcgcagattccgttggcgccgtgctccaggcatctcctggcggttgccgcagtgtcgggccagttgccggacagcttgcagataacgggaatatccacatgctccttggtgtagtccagcatgggaagcagtgtgtcctctgtataggataccagctcaatcatatgggctccggcacgttccacatcctttacaatggcctgggcctcctttaaggtatggcccacggaaccaatgacaacggctccggctgcaacggttttcggtatctcgttctcataccagttcaggcggtcggaatcagcccacttctcgcagttgatcagggaatcctggttcacggtgcccatgtggtgtaccgggttgatggctgctcccaggcggatggtctttgtcaccaccgcgccggcgccggcctcatggcccttaatcattccctccgccccgtagcataagggtcctgatgagagaatataggggctctgcagatggcatccgcagaagtcaatggagatatccgctccggttaattttgatttatctaacatattttacctccagcatttgtttacttcagtccgccttcccatacaatggtcttatagcggtccggatccgtgtctccctcggtggagaacataagtaccttggaatcctgattcagtccaagctccagacgcagctcgcggtaggattcatccttcatgatggtggccagggcgccgaatgtggctgcgccggactcacctgaaaccacctgggggtctcccttaaagggagctgccagcatgcgcattcctcttctggccacatcgtcgttcactgccaggaaggcggtcacatggttctttaagatatcccaggaagtgatattgggttcgccgcagcacaggcctgccatgatggtgggcatttcgccgtccacaatgcggatctccccgtctgccgcctctgcgcccctgtaaaggcaggctgcaggctctgcttccaccactaccatgaccggaggattcttcttatacttgttggcaaagtatcccaccacgcctcctgccaggcttcccacgcctgcctggacaaacacatgggtgggacgctcctcaaactgctccactgcctcgtcagccatggtggaatagccctgcataatccaggacggaatctcctcatagccttcccatgcagtatcctggatgaccacgccgcgctccgcgtgtttggcctcctcggccaccatcctgacacagtcgtcgtagtttaccttctcgatggtgcactcagcgccttcatcctcgatgtggcggcgcctgttctcagtggagcccacaggcatacggataacgcatttctggccaagacggttggcggcccaggcaacgcccctgccgtggtttccgtctgttgcagagaaaaaggtggcctggccgaactcgtcgcgaagctccttggaagtgagcacgctgtaaggcatctggctgatgtcgcgttttgtctcttttgcaatgtatctggcgatggcataggaaccgcctaatactttgaatgcatttaatccaaaccggtagctctcatcctttacacaggcctttgccaggcccagatattccgccatattcttaaggtctgccagaggtgttacctggtactggggaatgctttcatggaaagcccttgccttctttacctccaccacagacatgatgggaagatttttgtcttctgtcttaggcatcttgtttaaagcccatttgatttcacagctcatgttccaatatctccttgatttaatattacaggcaaacgtcagacgcgtcctgccccttattaccggttacagcttctccatatggagcttcttaagctcctctgccgcctggtagatggcgtcggtcagctgctcataccctgtacagcggcacaggtttccggatatggcacggcggatttcctcccgtgtggcatccggattctcgtctaagagagccttggcgctcatgatgaatcccggtgtacagaatccgcactggagcgcatggttctcaagaactgcctcctgcaccggatccagcttcccgtcgcagcccacgccctcgatggtgaccacgttccggccgtccaccgccggagccggcaccagacaggccgtaactgccttgccgtccataatcacggtacaggcgccgcactcaccaattccgcagccttccttggtaccggtcaggcgcaggtcgtctctcagcatatccaaaagcctctggtggggttttacctccacctggcagggctttccgtttaatgtaaaacttattttcatcttctccactgctatacctccattcctgctgcctggcacagggcccgaagtacgatttcctggaccgcaggctccttatactgggtggaccagcggacgccggtgcgctctatcatgacctctgacacggcttttcctgctttggcaaacagctcctcagacggcttctgccctatcaggacctgctcggccttctccactctgtcaggcagtataaagatacatcccggagcgattctggcttctgtgatggttccctcagagtccatggtaagggccgcagcgcagttaagcctggatatggccagagcctttcttctgcccagcttggaaaatcccattctggttccctccggcagcttctttaccacgaattcgcggatgaattctcccggttcaagcttaaggcttccctttccctcataaaaatccttaagcaggcatacccgctcgccgtcctggccgtacaccttgataagggcgtccgccgcaatcagggccggaagggggtcggaggcaggaaatgcattgccgatgcttccgcccagagtcccgcggtttcgtatctgcggggaacccacggtggcgctggcccatcccaggaaggggatgtgctttgcaatgatttccgactgttccaaatccgtgtgggtggacagcgggccgatgtatacatactcctcgtcctcgctgatatagcgcagctccttgtctaaataggtgatatcaagcagacactggaggtccttccatcgtttatccttttcgtgaatctggaccatgatgtccgttcccccggcgacgatacgggccttgccgccgtattccttaagcactttcactacgtcgtccagggaagcggccctgtgatacttatactgaatcatttgccgaatctcccttctactgtaatttatgtcccagcaatactgtctctaagtctgcaggattttcatagatccggcggccggtggcgttaaagatggcattggcaatggctgcccctacgccctcggtggctggttccccgatggatttggctccataggttcctgccggatcctggttttcatatatattgatgttcattttcggagcgtccatggaggtgggaagaatgtagctgtcaaaattctttgtcttctgcccccgctttccggttaccacgtcctctgtcaccgcaaagccctggcccatgacaatgcctccgtaaatctgtccctttacaagagccggattgatggcggtacccacgtcgtggctggctgttacctccagcacatccacgtagccggtcttcatatccacttccacttcagccacgatgcagccataagcaaaggtggggaatgcttttccctgtcctgtttcgtggtcctgaatcaaatcctggggcttaaaccactcaaaggcagccatctgtttgccggtccagagacaggcattgcagacgccggagaaggggaccttcacatccggatatttcttcaaataaaactggctgtctaaaagctccacctgatctgctgtcagcttgctgtaatccagggttcccttcttaaggccgtatgccttctcgatttcctccagcggaaggctgtgaagctccagggcattctggatcatgactcccttcagcttctctcccgtctttctgacggactgtgctcccatgaccgttcctctggaagccactgtcatgccgcagtccgggatggaatgggtgtcggtgccgaagaaacggattgcctcatagctcacacccagggcttctgccgcaatctgggcataggctgtctttaatccctggccgttctctgccagaccggaattaatcatcacggaaccgtcctcgttgcagatcatcatacatcctgaagcgtccggagattcagctcccaggccggaacccctgtggcaaacggccaggccgatgcctctgcgcttacggcttccctcaggctggtttaagtaggccgcgtgcttctccttgtaaccggtctgctctgcggtggcgtccatgatatcctgtatcacgcagtgttccacgggtacgccggtggctgtcagagctccgtcgtggagaaggttcttgcggcggaattccagttcatccataccgcaggccatggccagctcctcgatgaactgctcctgcgcccaaatcagctgaggggatgagtagcctctcatggcgccggagtgtacattgtttgtgaacacaccgtatgtatccgtcttgatattatcaatctcataagggcctgctgaatggacatttgccctccagttcatgaactgggtctggttgttgtaggcaccgcagttatccacctgctcgccctgccaggccacgatccgtccgtcctttgtgattccggccttgtagcggaggcggaagggatggcgcttagcggattccaggaaggagtcctccctgttgaacacgaacttaaccggctttttcgtcaggctgcacaggtaggcgcatcttcctgccaccagtcctgctccttcttccttgcctccgaaggtgccgcccagggtctcctggaccatgcggacctggttcatgggcactcccagcacatccgccacataccttcttgtaaagaagggattctgggaagcggaatgtacggtcatggcgccgtcattgggattcaggtaacagatacatgcctccggctcaatataggagtgctcaatgtactgggtcctgtattccctctccagaacaatatccgccttttcaaatgctgtgtccgggtctcctttgcggatatggaacacggaatccttaaaaatattgtcgggatatttctcatggaccgcaaaggcgccctcgcttaaggcttcctcgatggtatacacgcccggaagctcctcatactccgcatgaatcgcctccagagcctcatccaccagctcctttgactgggctgcgaccatggctacacagtcgccggagtaacggatggtatccgtcagatacatgtatcctgcccagcttctggtgcggggcatgtcaaaacaggtaacaacagcctccacgcccggaatcgcttttgctttcgcggcatcaatggacactaccctggcactggaataggggcttcttaaaacgccagcgtaaagcattccttccatatatatgtccgctgcgtagcgcgcccttcccgttaccttatccaccccgtcaatacggggtacgcagtggtttaccacagaaaaatgtttttcgcctacttttgttaacgacattctgaatctcctttccagaacctctctgtcttttcttccatctctctgcgcacagcctctttgtcaagagtcaccagctttccgtccctcttaagccatgcgcctcccaccatcacgtttatcacattctgggggttggtaaaaagtactaattggtcatatacgttatattcattgatgggagtgggtcttgccacatccacggtaatcaggtcggccagcatgccctcctttatgactcccgcctctatgcccactgcctttgcgccgagctccgttgccatacgatacaccttccttgcaggcatggcctggggatccttatggtagcccttgtgaatcaggaacgctccgcgcattacttcaaagaaattgttcacatagccgtccgtgcccaggccaacggtcatgccggcctccagcattttctctatgggagctattcctccgcccacctcgcagttggacagcggcatggaaatggccttcacgtctttttctgccaggatagctatttccttatcagtgacctgtaccagctgggaagccaggacgttttcgtccaggcatcccatgccgtcatatgcttccaccggcgtggtttttaaatgttccctggcccatgccggttcaaggtcgctttcactcatatgcatgtgaagcaggcatccggcttcgtctgccatgcgctttgcttcacgtatgaaatcctcgccgcaggtaaacagggtgtggatgctcatgacgcctttcacaagaccgttttcctcattacaggcctttgcaaagtcgaagttttccttcagacccagccggccgttttccccgctctttctctcacaggcctcaaaggacaggaagccccgcaggccggctttctccacttcctctttttctaccgcaagagcgccgggaatggaattaggtccttccaggatatccacaaaggatgtaaccccggagtcaatcatctccacgcaggcccacctggtggtgatacgcgccaggtcatggtccactctgtcctccacgtagggccaccagaaatcctccagataatcggagaaatccgttaccattgcctctgccgtgatgccgtgggaaaggacgccgtacatatggttgtgtccattgacaaagcccggaagaagcatctgtcccggaaggcagactgtctgcacctcctcattgcttccgctgcccagggtatcccatggacccacacaggcaatccgtccttcttctatccggacgccccagccctttttcaggccctccggcgtcaatacatagtctggttttataatggccgctgccagatttccattttttatcattctctactgcctctcatattttctataagtatcattccacttatgtccttctaagcggttggtgatattgcctctcacgcagagttcctccgctgccttctgggctgcccgaagctctgtcttttcatcctctactgtcaggataacacccttttccatgactgccctgccgtccacatacacgtctgtaatgttctttaatgacgcggagtacaccagggtagagcatgggttgtgaagaggtactgccttgacgcactcatacgggtcaaagattaccatatccgccttcttgcctgcttctatggaaccaatctccttttccattccaatggcccttgcgccgtctatagtggccatctccaccaccttctcagccgacatggacagcggatccctggtagcgcacttctgcagcagggccgtgttcttcatcagctctatcatgtcgttggcgttgttggaagcagctccgtccacgcccagagaacaggtgacccctgcctttaaaagctttggaataggtgccacacctgatgacaggtacatgttggaacatacattgtgggagatcttaaggtcatattttctggccttctcgatatcctcatccgtcagatgcacacagtgcaccatcagtacgttgggtccgcagattcccatgtcaatcatggcgtcgatatcccacagaccgtggatgcccttggctgcctccctgtcaaactctgtctcagagatatgtatggtaatgcctgatttgtactcgttggtcaccttccagagcatctgaagcgtctccctggtgttggaccacatggctgccggcgccacccagattttaatgcggccgttgtcgcagttgtggtagcgctcaaagatatccctgacgcccttctcgatgtcgtccttctgctgtgtgatgcccggatgcacgccgtactggattccggtgtccatgcagcccctgccgaagatgccgcggattcccagctctctcatggcctttataacgccgtcgtccagcccttcccttggatggggatacatgtaatccacgttggtggtgataccgctgtggatgccctccatcaggcccagcatggcgccgtggtagcagtcatcgggagtcaggttggtggctgcagggaaggtcatggtttccagccagtcctttaacaccatatcatctcccagtccccgaagcagggtctggaacaaatggttgtgggtgttcacaaagccggggaacattaccctgccctccaggtccgtcacgcgttcacaatccgtatacttggcctccattgcctcggtaggtcccacttccacaatccggtcgtccttaacggctaccgcaccgtgaaagaatatctccctgtcaggatttaccgttacaatgattccgtttttaaataaatggctgatcatagtcaaaactccttttctcattgattcacacaaatgctgctctcacacgtatggttctcgcacgtatggctctcacacgtacggctcttacaatcaggccctggctgttcccagctcctggtccttggcagatacagcgtcatcttccgtctggctgatttcccttatgtactctgcttccacttccttgtccgtctggtcctttggaagtatcaggttcagtataatggcaaatccggccaccaggatgatggatgactccccgaagaacatctgtacatattcacccatgcctgacagcgtatcctttgccagagagatgcccagtcccagtgcaagggcaggtccgcatataagcattgccctgttggtaaatctggctcttgccaccaggctcatgcctgacatacatatcatggagaataccacgatggtggctccgccgataacgcagcttgggatggtggaaagcacgctggccagctttggacagaacgcggctgccgtcagtgtgatggcgccccagcccataacccagcggttacaaacctttgtcaatgcaacgataccggagcactggctgtaggttcctgttgcaaaacagttgaagaaggaggaaaagatacatgcaatgccgttggcgatgataccgccccgcagctcctcattcttcggctgtctgttaagaccgcctgtggccgaaaccgtaaagtctcctgacatctccactgcattaatgaagaacagcaggataaataccaaaacaaagttcaggtggaactccagttttccgaaagccattggccttggaacagcaaaccatgccgcttcgctgatgggcgaaaaattaatgtatccgaagatggctgctatcacatatcccacaatcatgccgcccagcactgctgccgcgctgaccatgcccttgccgtagccgttcaaaatcagaatggccagaataacgatcagaccgatgacaaaattgtggagctgtcccatggacgggtcaccctgtccgcctgccagattataggcagctatggggaaacaggagataccgatagaggtgatgatggttcctgtcaccactggcgggaaaaatctcctaatttttggaagggcaaaaccgatagcaatagacacaagaccgcctataagctgcgccccaaataaaacccctaacccataattgacagatacggaaatgcagatgggaagaaatgtgtatgtcagtcccatcatgacaggcagccctgatccgaattgaatattgccgaaccgtatggggaatacctgcagaagtgtggccacgccggctcccaggatggagcactgcagaagcagtgtagcgtgtgaagtgtccatgccgcttgcatttgctaccagaatcatggggactatgtttcccacgaacatggctaaaagctgctggaatcccagcggaaatgcctgtgcgaatggagggcgtccatttaactcataaatggagccagttttaatagttgaagtacttttggatgcattcttattcatgttgttctcctttaactgattaagaatacgaaagggggcttcttcccttcgggtgttcctgacttcgtcgttacccaccctgattcgtaccaggatgtgcctgtggtatggttctttatccgtccagtgtacaggcttgacagatagactaaagccggagaaaagcctatctgaccaatgtgttcctgagtaaatagttgccggccggtacatctgtcttaaatgcgccgtcctctatgattttttgccctctcagaaatacatgctggactttatgtgaaactaccattccctggtatgggttgtagtctacatactgtttctgtgtgccggcatctatgacatgactgctgtccggccggattaccaccaaatcagcgtcgctgcctggctgtatcactcctttccttggatataaaccaaatatttttgctggattttctgctgtcatcctggcgatgtcgctgtatgtaaggccatggctctcagcctgtgaatacataagctccagccggttctccacacccggaagtccgttaggtatgaggcggaagtcccccaggcccaaatccttctggcccttgtagttaaaggaacagtgatccgtggaaaccgtatccacaatccccttcttaagtcccctccacagggcttcctggtccctgctgcttctgagcggcgggctgcagacatatttggccccctcgaaaccgggaagatggtacttttcctctgtcaggaacaggtattgaggacatgtctcgcagtagaccctcactccctcttcctttgcttcctctatctcctcaagcgcctgtctggtgctggtgtggactatgtaaaccggaaccgtgagaagccttgccatgtcaatcatccgggacacggcctcatgttccacctcattgggcctggacatcggatggagggatatatccgccggatgcccggctgccagttcctcccggcgcacatccaggatatcgccgttttcgcagtgtaccatcagaaggacaccgtgtttcttcattagtgacaggagccggtacatatcacggtcctccactcccaggtcccccttgtaagccgtgtaggccttaaaggaagtgactccctggcgaatcatggagaggatttcctcctctatcccctcgtcataccgggccacggtcatgtggaaggaataatccgtaaatgaccgtccgtccgctttctcatgccaccggtccaggccgctttgaaggctggccccatggtccggctccgagaagtcaatcacggtggtggttccccccgccacagccgccctggtgccggtctcaaaatcatcggaagtcatgatgctgccgcagggcatgtcgaaatgggtgtgggcgtcgattcctcccggcgcaaccagacagccggacacatccatcacctcttccccttcaaggggattcaggccggcgcctgtctgtaggattcgtccctcgtccatgcggatatcctgccgggtacatcctgacccgctgaccacaattccgttttttagcagcatccttttcacctctttatcctgtactttatcccgtattcccggttaaaccagcttcctattccggcttttaccgcaattatcgttaatttttagacaaatataaacaaaaaaaacaagagccgcaacgctttgtcaaaggttgccaaacccttgttagggttaacaaaaatttttctctcctggtggagctttatgattatgtctacattttacatcttaatctcaaaatgtcaatatactaccaaaagattttcgccaaacaaagcattttcatgtattacttacaattttcccactccttctttgtgatattttccgataaattagttattctcgtccgaaaataacgacaattctaattggtatatttttgagacggagagcaaaaacccctgtccggaatagtccgggcaggggttggattacagatataaaactgcacttaatcctttaacagtttgtattaaaatggaaattttttttaattttatacaattttcggaatatgtttgttatttttctatcgagcctgtcttttcttttatgtattcaatgctcaactcatataccttattcttccactcaaccgaggtaaactgatgattggcaccttttattatttccagccgggccttttgcccgtacaggtccagatatggtccaaccgcataaaccggaaccttctcatctaactcgccgtgtataagaagcacctctttgccgtaaccttccgcctgcctgacaatatccgtctttctcacctgggagaggaattcactggacatcataagtccgcctatgtcgtagaactcctcgtagtggcccggaacagcatggacacggctgctgatatcatagtagaccacatttcccggagcccacataacagctcccctgggctgaagctgcggtatgatgttggagacaatggcccctcccatgctgtgccctacgggaaacatattgtccctgtcacaccatggctgctcactggcccacagataaatggccgttgcctgctccacctcatccatatatctcatttccgaaaagtccccatcgctttcgccgcatccgtaaaagtcaaatttcacacatgcgatgccattgacagcgcactttctggcaaacaattcatgaagacgcatctggccaatccgatccacgcaaaagccatgataaaaacaaaccacagggaagggacccgttccctcgggaagccttacgtctccccgcagaagtttatgatttacttccaattcaacattaataaacattccttatcctcccattaaccggtaaatgtatatcccagcagcttcggcaggaacattgttatctccgggaatataatcagtaatgccagcagtatatagagaacgattatcatggggaacgtatctttaaaaatctcctcaaaactggtttttgatactctttgggcaacaaagaggtttcctcccatgggaggcgtaatcattccgatacacaggttaatcaccataatgatgccaaaatgaaggggatcatagccaatggctatcgcgataggcgcgaagatcggcccaaacagtacgattgacgatatggtatccagaaacatcccaataatcaggagagcaatattgatcatcagcatgatcatggctctggaacttgttatggacagcatccagtctgtaatcatggtcgggacacggttcatggtcagtatccgcccaaaggtatttgccgcgccaaacagtatcatgatggtagccgatgtgatagtcgcgtcaaacatggcctggcaaaaagccttccagctaagatgatggtatacgaaaacagctacaataattgcatacacaacaccgatgaccgcggattccgtgggagtaaacacaccagagtaaatgcctcccaatataatgacgggcatcaggatagccggtatggcctctttcagaacaaccgctttttccccggcagtctttgccttggtctcattccccttgtagccccgctttttgctggcaaaatagttataaatcatcagagccacacccatgaggacaccgggaataatccctgcgataaacatataggatacggaaaccccaatggtaactccgtacataatcatgggtatggaaggcggtattaccggtccgatggtgcttcctgccgctatcagggctccgctgtaccctttggaataaccctgggccgtcatggcaccaatcatgatcccgcctatggccgcagctgtagcgggaccggaacccgatatggccgcaaagaacatggatgctactatggcagccatccccaatccgcccggcatggtacctgtcagcatttccgccacatccaccagcttttttgcaatgccgcctctctccatcaggcttcctaccagcataaaaaacggaattgccatcagtgaaaatgaatcaatgcttgtgactgtggactgcgccagcatctgtgtcatattgcttcccgcgttaaagacagagaatgtagccacacagctcaatcccagactcaccgcaatggggacagtacccaaaaggcatataaataatactcccagcattgtaccaatcatacctctgccccctcctttcctgtgttcatgaattctccaactctgcgctggataatccgtatactcataccggccattcccaatacaccggccagatacataatccatttgggaacaaagggcagggcggaaagaacctgcccctggttccgtatcaaattcataagctggaatatttcataagacatgtatatcccataaccggcagcaatcacatcccccgccaggtacactgcctcaaaaatcttcgggttcttcttaaaagccaatgacaatgcagtcactctcatatgggcattgatttttcctgcccagctgattccggcaaaggatgtccataccagcagcagcctggccaattgctcgccccaggaaagggtaaagttgaatacaaatctggtaacaacgttaagtgcaataattacagtcatcacaagaaacatgcatacaatgatatacttctcaatctggttatagaaaggttcttttttctcagtctgctccatgttgttctccttatatgcaaggccttttacttcatgtactttgcgttgatttcgtcaaccttgtttaccaaatcttcccctattccgggaacatacttgtcataaaccggctttgccgcgtcgcggaaggcctgtctctcctcatccgtaagggtaatgattacatttgtcccattgtttccaattttttcttccagttcagcctcattagaagcagaaagttcgcgctcataaacaatcatctcatccacacattcctgaatcaccttctggtctgctgcggaaaggctgtcccaccaggtcttggaggctaataatgggcttgtatcataaatatggcctgtctttataatatatttctgtacctcgtacaatctgtttccatcaatattggcaaaggggttctcctgggcatccatggttccattctgaagcgccgtatataattcagagaatgccataggcactgcggacgcacccagcgcattgaaatggtcaatgtgcatctgattttccataaccctgattttcagtcccttcatatcctccggcttgtgaatttccttatttgcagtcaattgtctccagccggtagccatccatgtcatccctttgaagcctgcgggttccagattgctgaatatttcctgtcccacttcgccgtccagcacctcctcagccgcttcattggactggaataaatacggaaggtccaaaagggcagtggaatccgtaaatgccccgagaaatgccacggaagaaattgccatttccagggtacccatctgaagctgctccagaagttccgtattatttcccaatgccgaggcagggaatacgtctaccgtaattcttccgccggttttctcttttaacatttctcctaatttgttggatgcaaggtcaataggaactccctcctggctgacatgggctatcttgatcacgataggatctccctgggtgtaatccgcatccccggcagatgactcagctcctgccgcctctgcctgtttctgtgcctcttctttttttgtttctgaaggctgggcagctgacgaaggcgcagcactgcctcccccacagccgctcaaagcgagcgctgccagcgaaactgcggttgcgattgccagtaacttttttcctgtctttttcattcttaatcctcccacataatgattgtattcatggactgtttctgtacttcctgtatgtattaagtatagcaatgccacaattgcaaaacaatatcagccgggactaataaaaagaggtggttattatatcaactgcacactcctttatcatgtgcaggtaaaaatatgctctttttcgccgtaatctcccccctcttgtatatatttcagcaattttctgtgtatctctcccaatttatctttttatttattgtatcaaaagcacatttttatattatgtaaaacttgatatacttaaaataataacagacaggagggacacatttatgtatcttgaagaactggaccttcaatatctgataaacagcgtccgcagtgtatgcggaaagcccatttttatcctgaatccaaactggtccgtcatatcctgcacacaccagggattcaccgaatatgcgcaggagattgcggccttctgcgcgtctgacaatgactatgggacggctgcctcccggtttggcatcataatagaaccgtgtatcctggaggaaaccctcatatgttacttcatgatacttgacaaaaagtccggttacatgattccctatctgaagacgttaactgaattgcttatttctccccagatatctgatatccaaaatcagacagccagttccagaagcatgttaatcaaccagattgccaacactggtcagaagagccctgagattgacaccttcatgaaggagtttgaatactcatacgactgccccagatgcgctcttttgtttgagattaaccggcatggaaaagaacactcccattaccgttttgactcctcggaatcctatctcaaacagctgattacctcatcctcattgtattccgaagaggatatatatggcttcctaagttcggacaggtaccttattttcaaagataccagctttgcgtccactatgtctgtccgtgaaatcaatgattacgccgattccatggtcacctccttccgtgattataacggtgaggaactgcactgtaccataggcagtacttatacggatttatacaaactgcgccaaagctatctggaagccctattcctcattgccaactatgattacctcaatgtagagtcctcacacgcgctcaatatacatgattttatttttgaatacgccgtaagcctgattcccagaagctactggaacaaccgcttccagaacctggcccaggacctgggcagctctcccgccctcatggagacagccctggccctttccagggaaaacctaaacctgtcacaggcagccaaggccctgggactccacagaaatacgcttttgcagcgctttgcaaaaataaagtcccggacaaagcttaacccgctggaaaatgaccatgaccgcatggtactgcgggcgttttccctgtatcagaaccagaaaataaccttacaggccggtatcgtaatacagccaaactccgtactccatcagggtatgcagaaaatggctgatttggtaaacaaaaactcctgtgggactatcaatataaacatccacaccctctccacctccggcaataacgcgcacctgtttgagatactccgttccggctccatcgaccttgtggtagctgccaccggagtcatgaacaagttcaccaacaaccgctcccgggtgctggaattcccttttttattccagtccagcgccgaagcaaaacacatactgaatacaattatcataaaagatgtagaacactcactggattccatcggtgttaaatgcttaaacatatggaccatgggatggcggtacctgaccagcaaggagcccatccgccttccccaggatatggcagggaaaaaggtgcgtgtcatgtttaccgaatccctggatgaatattaccgtaatatgggggctgtccccatcaagatgaattacggtgacgtaaaagacgccctgcactccggtatcattgactgccaggagaatccctacagcaacacacttggaatgaaattttatgaagaacaggacttcatcacgcggttaaaatactatctgagtacagaggcgctgtatatatcaaaaaccgcctgggaaagattaagcccttcccaacaagatatcattgctgcggcggcccgtgagaccacggactggatttttacggaacagcagtatgtgattaaccagcaatgcaaaaatatcctgctgacagaaaaaggcatgcatatcatagaagtctctgccggcgaggcaaaactctggaaatcctattcccagaacctgtatgcctcctttccccatcaggatttactgaaagagatagaaaaggagaaaacagaatacaatgcaaaacacagagctctcccatctttataaatcctttaaaagcatatttccaaccgcccatatcgtgattatcgaccataccggcagtgtaataatggcatgcgaaaaccgctgccttattccccaaacggaacaatacagcggttttaaagaaatccttacggttcatgccccaacgggcggtactttttataaactatccttcccccttccgctgtcaaatcagctgttcctctatataccctccaaggatattgaagatgttctgacagctgccaaaatggctgactccgtcatacaattattcctgtcacgtccaagccagtccgtgcaatctgtacggcaaagcgataccatgctgcttttggatcatctgttccatccttccaccgcagaagaagatacttacaccgccctgctggccgcggaacttggttttgatatgtctctgcccagggctgtgtgcatattccgcatagaacaggaccttaagaatccggcatcaaaaatatcttccacccgttccattctgcagaccatacacaattttgcggcctcctctggcagtcaggatatcatcggagcatttggaaacagcgaactcatactttgtcatgtaatgggggcagagtctggcaaagatacaaagcttcttgaaaatatttatacgtatatcaataaaaattactttgtttcctgctgtatcggggtagggctcaccgtaacagatattggacattactgcgacagcttcatttctgcccaggctgttttcaggtacgcacagaaccggccggacagagaaaaacgaatctattatatagatgactttttggcggaacaccttgtatacgaaatcccggaacacttctttgaacactttttcaaaaatgaacttaactatgtcaaagctactcccattgcccaggagaccataggcgccctggttgcctgcaatatggacatatccatggctgcggaggctcttttcatacacagaaacactatggtattccgcttaaaccagctgaagaagcagctgaatctcaaccccttccacaaagacaacgacaggttcaagctgatacttctctatcattattttacaaaaaagtacaatggaaaccattcgtcaggagagatgccgtaaacacaagaatgtcatgattccgtgacatcgggtatgtttttcattcttctgttttctccccgggcgcccacactgccagctcctttaccagcatgatgcgcccaattattacacacacagctcccgcggtattccacccgctgcttcccaatacaaccgagtattcataggacgccagccctgctgtcatccatatgaggtatccaagggaggaaggtccttttttgcaattttgcgtatactgcctgctaagctctccgtaataattcaacgtactgcacccgcaggctgtctctgccagcataaggactgccgtgatctgtatggatatccctgtgctctgtctcatgaacactgccagaatcaggtccaggatggtaatgcccagccacagtctgcctgtctgttccatcttacggttccactcaaatccttccccgtccccctcccgttccagcatcctgaaaccgctgcgaaacacaaggcagcccacaatccccggaactatgggtatccccataaaatcaatgtgaaatgacaaaagaaacattcccgccatcatccattttgcggcctcattcatggtttaatccccctttccttcaggtaacggtatgtctgcttaaaccggtctgtgtttctgttattttgccggtccaggttcgtggtaaaccaggactctcctcctgagccgtcagaacatttccactgaatcagagcggtatagggttcaaattgttcccttatatctccggtcccgcgccatgtagattccaccagaaaggtatccccttctgtcatcgcagcaggctcccactcccatatatccgttccgtccactgtaaccttgaattctcctcttacctgttccgggttttggatctcaaagccttccagacggcaatccctttgcacaagatagcgggtcatggaggttccgtcggaactggacgatcctcctgtgaccgtaacatattccatgggcttatccagagtaaggatgatttggcctatggacaccacctcctctgcgccatcgccgtatctgacttttatggtatccagagtgattcccctggctccaaggcttctggccggcagcatcatcttgacaaacagctgcttaaactggtaccggccgtcctgcacagagcccgaataggactgaaacaggccgcctgctccgtcgtatggggtcatccagtattcccctatcccttccagctggggaaaggtaatttccgccactttggaggtatcctcactgtcctggatatagtatatgggaaattccttccacacatatctgtcctcaccggcagggctctctgcatctacatccgcattcccatccatactccccatcgtatccccatccataccgccatcccagtacatctccagctctatgtgcataggaataaacacaggatgcctcagcgcaaaataatgctgcagcagactgccggccgccacgattaaaactccggctgtcataaaaaaataaaacaaaaacgcggactgatgaatgaatcggtcttttggcctgtccatactgccctcctcttctttttcttccttaattttccttcccttt

SEQ ID NO: 3158 - DNA, 4278 bp, Unknown
  gut microbiota DNA sequence
aacttttggatgcagatgcggattacagtgcagtaatgaatggagatctgacagatggaactatcatcctgatgcatgatattcatgagccatctgtaaaggctgctttgagattgataccggatcttattgcacagggatataaacttgtaacggtaagtgagatggcagaagccaagaatgtgaccttacagaatgcatgttatgtggatttctggccgagtacactcagtaatggagatgtgccgggatatcagggcggttccgatgcagcagcttctgcagacggaacagatggtacatctgatgcaagcgcagattcttctgacggaagcacagattcctcagacggaagtgaggattattcggatggaagttcagacgatggaagctatgatgatggaagttcggatgacggaagttatgatgatggaagttcagatgattcggaagattacagtgatgattctgtagattacggagatggaacggaataaaaaacatatgcaatcctgcagtgtggatcatacagagtaattacgaacatacgaaagagcaaagaagagagcaaaggtacttctttgctctttatgttttttacaaaaaacacataaaatatataaaaaaattgttaaatatacacatatttttaattgacgtatggaatgtccgttggtataataaggcttatagaatgactaaaagtcagttcgtattcctgattgaacttgctgtaagatagttactgttcatatgccaaaattccattgccgcaggcaatctggaatgaattttggctacgttactgagaatggagtgaacagtaacgtaagatatcctgttacagtattattttatggaatcagtatctgcaaaaaagatagaaaccgaagttaagggaggactccagatgggtgtgagtatgaaatttacggatttggatcaatatttatttggacagggaaccaattatgaagtatacaagaaactgggtgcccatccgactacatacagacgaaaaaaaggtgtatattttgcggtctgggcaccgaatgcacagtctgtttctgtaatcggtgaatttaatgactgggaggaagaagcaaacccgatggagaaggttgggccgatcggtgtttatgaagtgtttgttccgggggcaaagatcggacagctgtataaattctttatcgtgggtgcgcatggagagaagctatataaggcagatccttatgcaaatgaagctgaactccgtccgggtacagcctccaggatcacagatatcacagactataaatggaaggatgccacatggatcaagaacagagagaagtttgatgagcaggtagagcctatggcaatctatgaggttcatccgggttcatggaagaagcatccgcagtcagaggaaaatgaaaaaggattttataactatagagaattcgcacatgccctggcagcttatgtgaaggaaatgggatatacccatgtagagcttatgggaatcgcagagcatccttttgacggttcctggggatatcaggtgaccggatattatgcaccgacttccagatatggaacgccacaggatttcaagtatatggtggattatttacatcagaataagattggagttatccttgactgggtacctgcacatttcccgaaagatgcccatggtcttgcgaactttgacggaaccgcagtgtatgagcacgctgatccgagacagggagaacatccggactggggtaccaagatttataattacggacgcccggaggttaagaacttcctgatcgcaaatgccctttactgggtggaggagtgccacgtagacggacttcgtgtggatgctgttgcttccatgctttatcttgattatggtaagaaggatggagaatggatcgcaaataaatatggcggaaatcagaatctggaggctattgaattctttaagcatctgaatacagtagttcttggaaggaatcatggaactgtgatgatcgctgaggaatctactgcatggccgatggttacaggggatgcagagaaggacggacttggttttagtctgaagtggaatatgggatggatgaatgacttcctggaatatatgaagctggatccgtatttccgtaaatttaatcataataagatgactttctccatgtcatatgcatacagtgagagatatgtattagttctttctcatgatgaggtggttcatctgaaatgctccatgcttgagaagatgccgggagagttaccggacaaattcaggaatttaaaggctgcctattcatttatgaactgccatccgggtaagaagcttctgttcatgggacaggaattcggacagcttcgtgaatggagtgaggagagagaacttgactggttccttctgaatgaagagccacacaaggaacttcagaattatgtgcatgatctcctgactatttataagaaatatccggcactttatgccggtgataataatccggaaggatttgagtggatcaatgcgaatgacggggacagaagtattttcagctttgtgagaaagtctcctacaaagagaaacaatattctttacatagttaactttacacctgttgaccgtccggattacagagttggtgttccgaagaaaaaacagtacaagctgatcatggacgagaatggacttctggagcagccaaagacatttaaggcagtgaaacaggaatgtgataacagagagttttccttcgcatatccattgccggcttatggggttgcgatttttacatattaattttgagggatgatttcaggatatatgtaaatatctgagagaattattgtcaggggtatgttatttatttgacaatattgcagagtaagcatgataatatatgaaaaattcgtgaaatataaataattgcttttgaaatttatctgcgttataattatcgcgaacgcaaggaatagagagaataatggtttccatgttgaaaggagaatgaacatgaaagtatctaacattaaagacatcgataaattttttgctgtagttgacagctgcgaaggcagagtagaattagtaacaggcgaaggtgacagactgaaccttaaatctaaattatcccagtatgtatctctggcaaacattttctcaggcggagagattccggaacttgagattgttgcttatgagaaagacgatattgataaattaatgagctttatgatcaacggttgatcattagtgtatacaggcgggggcatgatggtggatcatgcccctttctttgatgtgaacaggcaggttgttctgaaggtattgaacagctgcaggatatttgtaaaccagggggcacaggcgtttcctggtcaaagtgcgttgatggcagacttgaatacattggatatcttatgtataatgagtacgttataggtaaatatataaacagacagataatgatggcagttccaaaagttattctgtttgttcataaaaatggcagaatataaaaaatgacggctatatggcagttattcagaaatataaattttaacgaagaggagaaataagacaatggcaactaagattgatattatttccggtttccttggagctggtaaaactacattgattaagaaacttctgaaagaggcttatgcagatgagcaggttgtactgatcgaaaacgaatttggtgagattggtattgacggtggcttcctgaaggaagcgggaatccagatccgggaaatgaattccggatgtatctgctgttcattagtgggagatttcggcacttctctgaaagaggttgtggacaaatatcatccggacagaatcctgatcgagccatcaggtgttggtaaactttcagatgttatcaaggcagtacagggtgttcagggagatgtggatatcgttctgaacagctatacaactgtagttgatgcaaagaagtgcaaaatgtatatgagaaactttggtgagttctttgataatcaggttgaatatgcaggtgcgatcatcatgagccgtacagatatcattgatgagaagaaagcacagcaggcaatggaacttcttcgtggaattaatgcgaaagctgctatcatcaccactccgattgagaaactggacggaaagaaaatccttgaggttatggagaaaccggtatctcttgaggaagaactgatgtctgaggaagaggtatgcccggagtgcggacatgtacatgaacatggagagcatcatcatcacgatcacgaccatga

SEQ ID NO: 3159 - DNA, 29160 bp, Unknown
  gut microbiota DNA sequence
ggaagcattgcttccgaccgcagaaggagggatttgaaccctcgcgccgctactaacgacctactccctttccaggggagccccttcaacctcttgggtacttctgcttggttgaatcttgtttcatattcaatttatattcgcaggcaaatcactaaaactcgtctgcagcggagagggtgggattcgaacccacgcgcccttgcggacaaacggttttcaagaccgcctcgttatgaccacttcgatacctctccgaacgcgcttttccattttacagaagtttcgacgttttgtcaagtactttttttattttttcaaaactttatttttctaagttttgtgttttgctgctgttctcagcggcaactcgattagtctatcatgtaattcgacagatgtcaacattttttttaactttttttctgcaggttgaattttccaaaattaggaagattcaacctgcgttaccaactgttattcattccaattcctggtaaacctcttacaggtccttatccacggcccagcggtccagctgcttcaggaatcttctatcctctgaaactaccttgactggttttttgtaatctatagccatcagtcccaatacggattttccgtctgcaatctgattatccattgtatgtactccaatatccaatggagaagcacaggccagatgcataaaatctcttaaatcattggatgtgtacagcataatttcacgtaccatattgatacctccttattcgggcatagtataacattttaggataaaatatacaatatccaatcatgattttatataattccattgagtcagagcagtacgcagctcatccttttctgctgccgccttttcaaatggctgtccgctcatcacaatctcaatcgcctggcgcattgcccgagcccctgctgctgcaccgcctggatgtccctgaacggctccccctgctgccagaaccacatcttttcccacttcccggatatacttttccaccatccccggatggactccccctcctatggacggcatagagggcttaatgtcatagaaaggaagcgtgagctgggctactgtctgcatatacttttgatggagaagcggatagccgccatagggtgtattaatcattacaatatcagctccagcaagccgtgcaagctttcccacagcaaggggagaggccattccattcatggctccttcaaaacacattccagtacctgccgaatgtcccaggataggaagaaccgtatgctccgccacatgcttaagcacgctgtatcccatggccgcaaaattaatcatcagtccatctgcaccggcatcctctgcgcgttttacattttccataatttcacctgcgccgctggttatgttcacaaaatattttacccgctcccctgtcttctcataggccgcctcagccgcctctctatatgcccttacccgttcttcgggcttgctgtaaacaggatttccaaacaactcatcgtcctttataaaatccacacctcccagtgcagtctcataaaatatccttgccccctctttcggagtcagtcctgtacacggcttgatcatattcaacaaaatcggccggttacttattccggcaaacttctgaattccttcaatcccataccgcggtcccctgaatttgcggacaaactcctccggaaactctatatctaaaagttttacctgggctgaggtggaggcatcgttgcctaaaagggcggtaataagcagcggcaggtctgtaccaaagtttacagcaggataggcaatctgaatcagatattctctctggtctccggtaatctgagtagccagatccagggaaggcacatcaaatacgttcaccaccttccccatatatttttcgcgaatctcctctgtaattccaggtatgggaatccatgttccaatggtctgccccactgcaagggctgccgctttcttaaggacatccacttccttcggcagactgatatgatatgttgctactgcataattttgtttgtgtactgtctccgataatgtataaagtaaagaatccatcttttctcctttaatccgcaacgctcatatgcctgacaaaacaaaagagcccggcatcctgtttcgatgcccaagctctgttatcactctctgattctgctatatacttatatcacgatttacgcattctcatgaaaatacacatccaaagagtaaggaatattctccgttctcttcttcagattctgagccaataaatgactgattcgttcgctgtcccgttgtttcaaggcatccagataactctggtgctcttcaatcatcctttccctggattcccggccttccaacagtttctgaccgtaaatcaatttaaagaacgacagattatcccacaacgattctatcatcgcacagattctgtccagctggctgattttatagattgaaaaatggtacaacctattctgctgatacacatcaattgcatcaagctcctcctgcctgacaatacgaatatattctgcgtgaatctctttcaggttttggatgtcttcatctgtaatcttctcacaggcatactttgctgctaccggctccaatgccgttctggctatatatatctgccgtacatcatcctttgtcaatgtcacaagcctcgtccctgcatatggaacagactccgcaagccctttcttctcaagattggccaaagcttcccgaatcggcatcctgctgactcccagctgggacgccagttcctccgtgttaagcttatcacccattgacagcttaccgctcataatccattccatcagcttgtccaaggccaagtccggaagcttgttatgctgaagcattcccctgtccagatcattcattgtaatacgcatattagatttcatatagctctcacctaagtaatatttacaagccaagcttcgaaacggtcacttttaaaatcgccacttgcgcggtttcttcaattaattctgctgtatgctctgcattaattgcatcttttccgactgccactaagccatgatctaccagtaaaaatccgggcaaatccgggttctctctatatatatcttccaccattgggaaatactctttctttaccatcgctgccggaacatctaacgaaggtaaatccgcgctcatcttgagctgggcgtgccacgtggtcctctttaaggcctttcctgtggatgcccatgcaatcgaatacggtgagtgtgtatgtacaacagcattcaccttgggacaaattctatatagcaagccgtgaagtaaagcctctcttgtaggttttccttccccttctactagatttccatcgaaatccgtgattacaaatccgtccggcgtactgtcaataaaagagctgccgcttgccttcacaatcatcaaatctttccctggcaccctggcactcacattgccgccgcttccggtttgtatacctctagtatatgctcttttgcaggctatgacaagttcctctgcaatttttttaacatcttctgacatttcctggaacgccctccttgtcctaatattgtatttcatcacctatcacagcatgctctttcagttcgtccaccatatggtgggcggcctgaatgccccattcctctgtatccagatttcctggtattgtaatgatttccacattgggatttctgatttcctttaactggcgaatgataatatcatccacctctttataataaagcgcctcgcccttgcgtgtattatggcgcattccgtctgtaggaatcagaagttttaccgggtaatcaattttctcaatccgcgcagcaaatcttgctgttgtaatctctgcttcatccggaagcagcttgatatgagccgtattggcgttatgcatcatatagattctttcgtccatgcggggcggaaactctcccacctgaaaatcaataaaatccaggccgcccacgctgaccaccagaggcacctttttctccaccccccggacaagacggtactttgcatcttccccataggaaaaaccgcctttaaaatactcctgtgtaatctcatgggttgttaaatccaaaattccgtctatcagcccgtccgccgccatctgctccatgattgctccgcctgcaccggtggaatgaaaaccgataggctctataccaagccgttccagctcatcaatggcagcacacgcccctgtgttcgtaatccccatcaaagtcacgcccacaaccagcttatcgccttttttcaggacctggcctgcatgtttcaccattcccgcacagcatgcacatgcatttgccatgatttgtctcgtcactatgttaagtccggtaaaatcgcatatggatggaatcgttactatatcctttgcccctaccacactttcaaatgttttgcggcctgatgccaccgtggttgccatgacttttgggaaacctatgggaagccgcttcatggcgttggtggccatgaccgtattctgaaggcctcctgctgaaaggattccgtcaatcttcccctctgcatacagtttctccacatacgacgccactgcctccatcataaatgcaatcttttcaccctttgtcctgggttccagctcagcccactctgtccctgctgctttggtgacatcttccctggaaacatcgtatccataagacggattggggcctgtggccacgttaattaccatggctttcattccctggctctcaacctgctcacgcatgtatgcaatctctctgtacttggtatcacagcttcctatgattgcgattgtattcatcactattcctccaatacgatattgtgaagaccatccccaacagtctccacaatatccctcatgggccccgcgttttcacaggtgcgtcttcacagatgcttattcacattacttctggctgaagtactttgtttttgcctttgcagctgctttttttgcatctttatcaataatcgcgcccttgtactcatcaaatacaaagtccgtgtccttaagcccgattaccggaagtctgttttcatgggtatcttcgtatttctcaactgctgcggataagataatatcatgggcaagcagaagatgcttatgagggtcaaccccagcctcatggcagcggcggaccgtatcgcggattgtctgccatgcggccactatatcaacatagcgtcccggagggcagatatcatagtgaagctcatcctgcatggtctggggagcatcaatgttgcccataacgaatacagaatcccccacacaatagtacggtccgtcttctgtttcaaccacaaccgtcatatgtccggggcaatgtccgaatgactcatatacacttacccctggtgcaatctgtgcctcgccctttactgtctcaaaacgttctttcactcccggctggtcatatggcgcaatgaattcatcattgcaggtcacgtctccatctttggcgataatgggtctgcagtatgatttgtaatgaagggggatcgggttatgggcatagtcccactctgtctcatgacaaataaaacgtgcctttgtaaatttttcaagataaaatacatggtcccagtgcagatgcgtaaacagtacaatatcaacatcagatggcttaaagccaacctgggccagccgtgattcaatgtcatcaattcccggtctctgcacagacgggccatggtgatacttatcggcatgctccgtccaggacatacccgtgtcaaccagaatcagctggtctccgccttcaattaagaatgtgaaatccggaagctggtccgagtcattggtaatccccagcttttctacaaattttttacacgaaaaatgataccagtactccaaaggtttggtcggaatataaccagaattaagtggtcggattgttaatggcatattaattttcctctctttctctttcatgaattatctatcttaaaaccgccatgggtttatcccacaggccgttttaatccctgtttatatgcggcaattatgctgccttgctttcctgtcttctcttgctgtacgtgtcgaacagcaccatggcaatgattacaataccgattaccagcccctgcgcataggaggaaattcccttcaggttcattacatttacaataattgtaagtatcaaggctcctaccacagttccaagtactccgccttcccctcccagcatggaggttccgcctacaaccactgccgcaacggtctgcagtccgtaactgtctcccatggctgcatctgctgcatttaaccttgccgtcatcagcatgcctgcaaggcctgcgcacatgctgcacatcataaatgcagataacataactttttttaccggaaccgccgcgtatttggcagccacaggatttgagccatatgcgtacacctgacggccgtaggtggttttctgaagcaggacatatatcaggatgacaaccaccgccgctatgataatcaaattgggcacaggacccgtataccccacacctatctgggtaaaacccttgggaaggtcatatatgaccgccccctgcatgaccaggaccgcaagtccgctcatgacccagttggtcccgtaggtagcaataaagctggggagaattccggctaacagcccgttgatgactcccactaccagtccaatgagaattcccagaataaaggctgccggaatgggtacaccatttttaatgcactgggcacagatacatccgatgaatccggcggttgctcccaccgataaatccataccgcctgtcagcagtactgccgtcaagccggcgctgagcaccagcaatacactggcctgcctgaatactgtgataatgttgtcgacggtcctgaaatttggggcggcaattgcggaaaagatgaccaggatgattaaacctatcagactgtaaaatacttttgaattccttatctcttcaaatattttctttgctttcatgtccctatcccccctattcctttgaacgagtacggacaaccgcatcaatgataatggccatcagaacgatagaaccaatgattgcattctgcttaattgactgcacacccactatgttcagaccatttttgatgacttgtataagaagcacaccaaaaatcgtgcctgtaacgccgccttttccttcacgcagagaggtccctcccagaagcgttactgccactgcctggaattcccagcccgtggctgccgtaggcatacctgcctcaatacggctgagtgtgatgatcccggcaattccggcaatgaacccggcaaatgcatatgttttaatcaggcagataatgggattgatgcctgcaagctgcagtgcctccctgttaccgcccagtccatggatattggttccaaacctggtcttattcagtaccacccacaccatgataaataccaatacagcggcccagaccataagcggtattcccataatcatggtctctgtaatgatacggtatgtaaaacttggaaaatagatagaagagcctgcagccaacagtaacgaaaggctgttcagtatattctgcattccataagtcgcgatgaagggaggaatacttccttttgcaacaatcacgccattcgccacaccaatgagtgtagtggataaaacggcgagcagcattgcagccggaagcgggattcccctcagggccatccacacagtaaatacggttacaaagctgacctgcgcaccaagagacaggtcggttccctgcgtcaggacgatacatgtctgcccaaatgcaacaatcattaacggggttgcctgaatcagcacatttttaaagttcatcagcgtaagatagttggggctcataacactgaaaatcacaatcagaacaaccagcatataggctaccggaggcagacttttcattctctgcacaatcttattcctctgcatgctcagcacctcctgctcccagcatcatccgcgctccaatgacctcggaattgaatccgtctgttcctctgatgacctcgtccacgatttcgccctcatgcatgatataaatgcggtcgctcataccaattacctcgggaagttcggaagaaatcatgataattgccttaccctctgctgcaagcctgtccatcaaatgatagatttccagttttgcagccacatcaataccacgggtgggctcatcaaaaatcagaatttccgggtcaaaactcagccattttgccagtaccaccttctgctgattgccgccggacagatatttacatgctttattaacgctggttgtagcgatacgaagctgcttcttatatcccagcgcaacttcggtaattttcttttttgaaataaagaagttagggaatatcttcttaaggctgaccgccaccatattaagcgcaattgactcatccagagcaagcccctgcttcttgcggtcctcgcttaccagacctattccaattctgacagcctgcacaggcgactttggaaatacctggctcccccgtacgtaaacttttccagacttaatcttctcgattccataaagcagctcggccgtctcagtgcggcctgcccccaccaatccggccaggcccacaatctcgccttttctaacggtaaagcttacatttctgacacgccctttataatcgcacagattctctgttttaagggtaatcccttcatgctcattctctgtacgcgcatagacttgttccacactcctgcccaccatcatgttgaccagttcctcgttggtgcaatcgttgattcccaccgtattaatcttaaccccatccctgagaatcgtgattctgtccccaatcaaggggaactcctgcatccggtgggatacatagataataccgatcccctccgcctttagcctgtgaatctgtgcaaagagggagtccacttctctttccgacaaagttgcggtgggttcatcaaacaccataattctgggattaaatgaaagcgccttggcaatttccaccatctgctgctctgctatgcttaagttctttacataatctttgggattcatgtattcacagttcaacgcctttaaaagctttgcagcctcttcttccatcttcttatggtcaatcaaacccagtttggtcttatattccctgttaagaaaaatattctgggcaacgctgatatacggcaccagcgtaaactcctgatatactgctacaattcccctggcaagagcctccttggtcccgttaaacttaaccacctggccgtccagccggacctccccttcttccggtttatatgcgccgagaagacattttgcaagcgtactcttgcctgcgccgttctcacccaccaggatatgtacttccccttcctgcaaatcaaaatccacatcatccagggccttcatgcccggaaaaagtttggtgatatgcttcgcagttaatattgttttccccatcgtttcaccccaatacttctcacggaatttatttcctctgtattcgtccccgcagtttcccgcggggacaaacaggtgaaatagttcagtttcaattttgccgcattctactggatgaccttccaccatgcaatgttgtcaatataattttgaactgtatcagcaattacaagcgggtcatttgctgctgtgggaaatggaatgaacttgccttccggttctgtcttatcattcagatacttaactgcataggcacatgcaacaaatcctgaaccatatggatccgtgttataggtagcgaacatggttccttcctttacagcgtttgtagcatcaacactcccgtcaaaaccgcagaccagaacatcactcatgttggctgccgtcagggcctggactgctcccagggcactctcatcgttgcaggcgatgactgcatcaatgtctgtatactgctgaatcaggttttccgttaccgacattccttctgtcctcttaaagtttgcggtctgtgaagcaacgatttcgattccctcatactcggaaagaccagtattaataccatttaatctctcaattgcatttgatgccccggccggcccttcaagaatgatgaactttccttttccgccaagcttgtccgccactgctttggccatggtgtagccggactcgtaatagtcaacgcctgttctgaggaatgtatcttctgctgccggcgtgccaatggtcagcaccagaacacctgcatcctgggcttttctcacgcctgtcatgataccgttggagtccgcacagtgtacaataattgcatcaacatcctgtgtaatcatgttctccatcaactgtacctgctcctcaaccgagtccgcagtcgtcggtgcctgtgtgatcgcggtaaatcccatggccttcccggcagcctccacacctgctgactgagccaccatgtaaggattcgttgtgttcttggcaatgtagccgatcttgtaatcccctcccgccttgacgctggttgcaatctgagctccgattcctgtgaccggaagctgacttacatcaagcacagtagcggcagacaatcctgaagaactgctctttgtatcttcttctgcctttgtctcctctttcgcactgctggttggtgcctctgtcggtgtgctgcagcccgtaaaaagcatggcagacattgcagccgttaataaaattgatactactctcttcctcatttttttcctccttgtttttttatgttattttggatattggattttggatacaatcttcttgtgattaatatagcacttccaaatttacttgtcaatattaaatagtatattcttgtttattgttcaatttttgtatatagtgcacatcactcttctgatttttctgtcaataattacaattgtcatttttttatcaggtatgtggatgttttttatgggattaatttatgagttgtatatagactgaacgaaaatgcatctgaatcagaatgataaaaaggggatacaggttatattttatcctgtatcccctaaaccgggtatcctcacctacacaatggaatttctcagcacttcggccataaaaaggtcctcaggcgtcgtaatcttaatattggcataactgcccattaccatatgcgccttcacccccatctgcgcctccaccaccatggcgtcatccgttatgccggtgcagtcctccttcatctggcggataaatgcctccacaatcaggggcacggaaaagacctggggtgtctgtgcctgccataccatgctgcggtccgggctggactcaatcattccctcccggttcaccagcttgatggtatcctttacgggcatgcccaccacgcaggcattgcatttgcacactgccctgtatgcccgttcaatgatttcgccggtgacaaaggggcgggccccgtcatggataaacacgtatccatcctgtctgtccctggcaacggattccttctccccctcttcccggtccataagggtacagagcgccttccatacgctctcgtaccgctcgccgcctccggcgcctatggtactcaccttcttcaggccatacgcctccacgatctctgttctcacatattccatatgccctgcatctgtcatgagtatgatttcatctatcacaggagaggcttcaaacacctccagcgcataggccaccagcggcttgccgccgatttccatgtactgctttgccgtattcccgcccatgcggctgcccttccctgctgccaggaccacagccgtacaatatttcttttccattgcagacctcctctttcgtccttcccggaccggagtccatttgttccttacatccccgccgactgtacgctccgacccaattttcaaatttcagacaggctctagcgttcacccagcttcagattgggaatggcattcaaatcccacccggatatatttccctttaaatattcatagtaggcagccgtcccgatcatggctgcattgtccgtacagaaaataggggacggataatagaactgaatcccgtccttctcacaggcctctgccatggcctttctcagcgcggagttagaggcaacaccgccggctatggccagcttcttatatccaaattcatgggctgccagtatggcgcggcttaccagagactccaccacggaattctggaatgaggccaccaggtcaggcacattgatttcttccccggtcatacgggcgtggttgatgtggttcagtacagctgactttagtccgctgaagctgaaatcatagggagccccctccaccttgcccctggggaactggatggcatggggattcccctcttttgcagccttatcgatcttaggcccgccgggatatcccaggcccacggaccttgccaccttgtcaaacgcctctccggccgcatcgtccctggtcctgccgatgatttcaaattccccgtagtcctttacaatcaccagatgggtatggcctcccgacacaatgagacaaacgaaaggcggttccaaatcctggttctcaataaaattagcggaaacatgcccttctatatggtgcactccaatcagaggctttcctgctgcatatgcaatggcctttgcctctgccacccccaccaaaagagcgcctaccagaccgggtccgtaggtcacaccgattgccgtaatatcctccagagccacctgcgcttctgccagggctctctcaatcacataattgaccgcctttatatgctcccgggaagctatctccggaaccacgcctccataaaccgtatgggtggcaatctgggatgaaatcacattggacagcacggtccttccgtttttcaccactgccgcggccgtctcgtcgcatgagctttcaattgccagtatcaaaacatcctctgatgcctgtcctatcatagtattctctccacttccacgtatcctccggtacctcgtaccgcgctatcagtcctcatcaaattccagctccgctgtccatccgtccctggcagcctttgcccttgggaaaatcgttctgacttcctccatatactcctcgggcttggtaagggaggggctgtaatgggtaagccacatctgttttggattagcctgctttgcaagggccgccgcttcataaaacgtcatatgcttatattccctggccttggctgctttttctttttccccgtacattccctcgcagataaaaaggtctgccccggctgcatactctgcaatcaccggcaccggcctggtatctgtgcagtatgtcaccttaagccctctgcggtccggccccagcaccatatccggcgtcaaaagccgtccctcatgctctatctcctcgcccttttgcagcctgctccagaatttctggggaatctccttagacctggccctctccacgtcaaaacgtccggtacgggggatggtgatggaatagccgtaacacagcacattgtggtttaccctgtaagcatctatcacataagggcccatctgcatgcgttcccggttctccgtaagctccacaaagcgcagttcaaagggcagttccggcgcaatggtgcgcagcgctcccaccacccgttccagccccttgggaccaatcagggtcagcggctccacccgctccgcattgcccatggtaagtaaaagaccgggaaggccgcttatatggtccgcgtgataatgtgtaaagcaaatgatatctatgggcttgggactccatcccttttccttcagggccacctgggtcccctcaccgcagtcaataagcagattgctgcccgagcaccttgccatcatggatgtgagccagcggtacggaaggggcatcatgcctcctgttcctaacaaacatatatccaacatactgtaatcctcattctctcaatatcttaactcacaaaatcatatcacactttcctcttaataatcaagtatcgccggaaaataacatggcagacacaaaaagtcaggcgcttaagtcagacgtcaaaaaggagctgccgcagcagctcccatatttatctgtaacagttacatttatcttatataaatcctgtcccgcgaaaggctggatgccgtcctacaccagatggaggggaatatccttctcagcgatgagctcctgccattcccggctcagcccgtcatccgtgacgatttcatcaatctcttccagttcagcaaaatatcccggccttacctggccgaacttgctgctgtccgccaccagtatcttctgcagggatgattccagggccgccttttttgtgaccacctcataattatgcgcgcaggtcatgcccagcttttcatggacaccggaggcagaaacaaacatcttgctggcccttgtcctccgtataagcccgattccctcaacgctctcaaacatcaggtcgttccggtggaaatatccgccggcaaaaatcagggaaagcttctcattaccctgaagctgggacaggatatggtaattatagcagagcactgtgagctgcgtctgttccggtatatatttggacaacacgcctgtggtggttcccgaatccagaatcaggatatccccctcctcaatcatccccgccgcaaaccgggcgattctgtcctttttatcaaaattgcggatctgctccgaagagtacagatattcgtcgtgttcccgcgctgccggctcagaagccttattttcgtaaaacagacggttttctttgagataatcaatatcacggcggatggtcatttccgagacctgaaagcggtctgccagctccttaattgataatacgggcgattccttcagtgtatccaaaagcgcgtaaatcctgagatccctttttcccataagttctgtttcccctcctgtcgcaatcctgctgcggcccatgggtgcacagcgttacgaatctgactgtaaaatattataattgtattttcagaaaatgtccagatgttcctggccgtgctaaaatgttatatattgtttgcaaaatgttacatctgcatttaatttaacattttttgatgatttatcttgatttttgtattctaaaatgttaatatatgctcatagtaacactaattaacatttttaccaatatggaggccaaaatatgagaacaattgtaattgggtgcgacaatgctgctgtacatttgaaaaatgaactcatgggattcatggagaaaaagggatatactgtggagaatatgggatgcgacagcactgaggattctacctattatccctatgttgcagagaaggtgtgccgggaaatcataaacagcggttatcagaagcacggtgtgctgatctgcggcacaggcctgggcatggccatgactgccaacaaattcaaaggcatccgcgccggcgtatgccatgatgttttctcagcggaacgtttaaaactgagcaatgacggcaatgtgatctgtatgggcgagcgggtaattggagccgagctggcaaagcggattctggaaaaatggctggaactggaattcgtagactgtgcatccacatccaaggtagaggccatcaaagaaattgaaggcgaaaatctcaaatagcggaggttgcttaatgaaaaaactgaatcggttatatcttggcacaaacacaaagatgtacaaaaccattgcggaaacaacttcatttctgacacagctccgccgactgacagaggacctggcagacagccccctcaccctgtttgtcatcccctccttcaccaccctggagtccgccaacaggattacatccggatcccacatccggctgggagcccagaacatgtgctgggaggaccagggacagttcaccggcgaaatctcgcctgtcatgcttaaggaagtgggggtaagcgtagtggaaatcggccactcggaacgacgccacgttttcagggagaatgactttgaccaggaaaaaaagacagcaaaggcagcccagtccggtttcacacctctgctgtgtataggagagaccctgacccagagggaatacggcctaagcggggagaccctgagcacccagttaaaggtggggcttcattccgtcaccgcagaacaggcggagcagctctggattgcctacgaacccgtgtgggccatcggtgtgaacggcatccccgcggacagtgattatgtggctgagcgccatgcaggcatacggcggattctgtgcgcacgctttggcgaggaacagggaagccgcatccccattctttacggcggcagcgtgaatccccaaaacgctcaggagctgattgcgctaccggatgtagacggcctctttatcggacgcagtgcctgggacgcctctcagttcaaccgcatcatacgccaggtcatgcctttatacatgaataaatagcaggagggaaatcatcaatgcacaatctgcttgtggcccagtccggcggccccacatccgcaatcaacgccaccctgtccggagtcatcacagaagccatgattcagggcggcattgaccggatatatgggggactcaacggcattgaaggcattttacaggaaaaaataatagatttgctggatcatatcaataacacaatggacctggacaaactggcccaaacccctgccgccgccctgggttcctgccgcttcaagctggccgggccggaagaggatactgcccagtaccgggttctgattgatattttccgtaaatatgatatctcctatttcatatacataggcgggaatgactccatggacacagtggataagctggccaggtactgccgttcccaacagattgaggatataaaaatcatcggcgcgccaaagaccattgacaacgacttgatggaaattgaccactgccctggttttgcctcagcggccaagtatattgccaccaccttcgcagaactggagagggatgtggctgtctatgattccttcggagtcaccattgtggaaatcatgggacgcaacgccggatggctcaccgccgcctcgtccctttccagggtaaacggcagccgcgggcctgattttatttacctctgcgaagtgcccttttccatcagccggtttctggacgacatacgaagccgccagtctgaaaacaggaatctgctgattgctgtcagcgagggcatccgggatgaaaatgggacctatctgtctgaacagactcccggcaaccgtcccgaccggttcggccacagggatattgcaggaaccggaggcgtcctggcccagattgtccgcaatgagctgggatgcaagacccgttccctggagctcaatctcatgcagcgctgcgccgcccatctggccagccgcacggatttaaacgaatcccggcttctgggagcaaaggcggttcagtgcgcagtccagggacagaccggaaaaatggcaaccctgctgcgcctgccctcaaaggaccgttaccggattcagtttgcctccgcggacgtgtctctggtggccaaccgtgaaaagacagtaccccgccagtggattaaccgggaaggcaacggcattacccgggaaatgacggattacctgacgccccttatggagggagaggtaccggtgctgtaccggaaccgctttcctgaatatttcaccatatcccttgaataagagccaggagcacatatataaagccagggatacatattaaggagaaccgcgttggcagttctccttatcccatcctacagaaattcaatctgttcttccctgtccacaggtatcttgaagccggaaaccagttcatcataacattcttcacacaaatcaaaatgatggacctgtccgtccttctcagaaaaataatcccatgcatggtcaatactgatacatccctcccggatgattccatgctgcaccaccagcttttttccgcagcaattgcacattattgtttccagctgtccatttttattgtaccttttcatatgaaccctcgcctttctctgtcatcgtatcctttcattcattcccttatcttccccttaaagaaaaaaggagaggaatgtccggttcctctccattatatacataaaatattcacattttaagtggtaattctttcatattgcccggttccacatgatgatggcatcctcggccggattatggtaatatcctttcctcacagcctcctgcctgaaaccataggaatcatacaggtttctggctcccaggttgctctcccggacctccagggcaatggcccggacccctctggccctggcaaaagtcaccatggcatccatgagtttccgtgcgattccctggcgtctgtaatgaggatataccccaatccgctgtatctccccctcgtctgccagaatccgcagaaccgcatatccaagtatggttccgtggtcagcatagacaaaatacgtatccagcctgctgtccagacccatgcgtatcagattctcagaccagctctctgaaaagcacacctgctccaaatccgccacctgctcaatgtcctggcccgtcatggggcgaactccgcgaatcagctccatttccctgctcctttctgtttccgcagcagcccatgccttgaatcagaccatgtatcagttccttgtgtctgctgcccttaataatctcccggaagctttgcggccgcccccagggcagactgctccgcctctctctggcgttcagcctggggctttctcagataatccggcgtaaactgcgccgccgtcaccacccggacgcccgggcagccctctgcatccaaaagcgcgttcatccccagggcagccacggaggcagccctctgccggttcatctgagccggtgcaaaggcatggggtacggtcagcatttccctgattatatctttatatacaggtacaccgtctcccagaaatatggtccgctctccttttttattgagaagtcctgccagctccctcatatccatgggctgctgctccatcaccacctccaggccgtccctggtatggtatagccccgtatagacctggctgcgttttgcgtccataataggacagataagcccctctgccccccacatattatatgccatggcatccacggtaggaacatggaccaagggctttttcagagccagccccagtccctttgctgtggcggcacctatgcgcagcccggtaaaagaacccggaccgccggccaccgctatggcgtcaatggtatccatatccagctccagaagctttactatctcatccagcataggaagcagggtctgtgaatgggtctttttaaaatccactgtatactctgctgtcaatatgtcatctgtcaccagggccacgctggccaccagggatgaactctctattcccagtactctcatcctctatcctccacgctaatccgcctgtaatcaaatcccttttccagatccttttcaatggtcacccaggtcaccttctcaggcagtatctcctcaatcaggcccggccactcgatgaggcagacgccgtccccaaagaaacagtcctcataaccgatttcgtccatttcactcacatcaccgatacggtacacgtcaaaatggtacagcggaagccgaccgtcctcatattgctgcaaaatcgtaaaggtggggctgttcaccggcccctctatgcccagacccgcggcaaatccctgcgtaaacacagtctttcccacacccaaatcaccgctcaggcagacaatctgtcccggctctgcttcccttcccatctttcttcccagctcatatgtttcttccggtttccgcgtctcgattaccatttcctacctctttcatccttactttacgcccttcatggtcagtgaaatcctcttcttggccaaatccacgctcaaaatctttacatccacgatatcgcccacactgacagcctccagcgggtgcttgatgtacttgtctgtcatctgggagatatgtaccaggccgtcctgatgaacgccgatatccacaaaagcgccaaaatcaatgacgttgcgcacggttccctttagcaccattcccggctccagatccttcatctccagaatatcgcttctgagaatgggccttggcatctcatccctggggtccctggcaggcttttccagctctccggcaatatctctcagggtaatctctcctatacccagatcctgcgccgtcctcttataatcctttatcttccggctgattcccagaagtcctcctccggacagttcctcaggcttatagcccagcttttccaggagcttcccggctgcgtcatagctctccgggtggacgctggttccgtccagaggattctctcccccggtaatgcgcataaagcccgcgcactgctcaaatgcctttggtcccagcttggccacctttaacagctgcttcctgctcttaaatgccccgttctcttccctataggccacaatgttcttggccaatgttttattgatgccggacacatattccaacagggaggctgatgctgtattcagatccactcccaccttgttcacgcagtcctccaccacgccttccagcgcctcgcccagacgtttctggttcatatcatgctggtactggcccacgccgatggacttggggtcaattttcaccagctcagacagcgggtcctggagacgtctggcaatggataccgcgctcctctggcccacgtcaaaggccggaaattcctcggtggccagcttgctggcagagtacacggatgctcctgcctcgtttacaatcacgtactggacctgttccctgatttccttcagcaaatccacaataatctgctctgattccctggatgctgtgccgttgcccacggatataagggaaatattatactttttaatgaaatccttcagtattttcctggattcctccaccttgttctgaggcgctgtggggtaaatgaccaccgtatccagcacctttcccgtgctgtccaccaccgccagcttgcagccggtacggaaagccggatcccagcccaaaaccacccgtcccacgataggaggctgcatcagaagctgttccaggttctttccaaataccttgatggcgccttcctctgctttttccgtcaaatcgcttctgatctcccgctctatggaagggccgatgaggcggctgtagctgtcggctgcagcttctttaaggattggcgtggtatatgggttgtccctaacaatggtctgcttttccagatatcccagaatctgctcctcaggagccagaatcttcacagtcagcattttttcattctcgccccggttcagggccaggatgcggtggccggcggccttcttcacaggctcctcataattataatacatctcatagacagactgggccttctcatccttggctgaggactggataacgcccttgttcatggttatatttctgatataggtgcggaaagccgcgttatctgaaatacgctctgccagtatgtccctggctccctgtatggcctcctggacactggccacgcctttttcctccgatacaaaaccggctgccgccttctcaacaggctcagctgtcatctgcatgctgataaggtcggccaggggctccagccccttttccttggcaatcatggcccttgtcctgcgtttgggcttgtaagggcggtaaaggtcctccacagccaccagggtctgggcctcctttatcttaagctccagctccggggtcagcttctcctgctccgcaatggaggcaatgacctggctcttgcggtcttccaggttgcgcaggtattttaaccgctcatccagattacgcagtacctcgtcgtttaaggagccggttgcctccttccggtatctggcaatgaacggaatcgtatttccctcatcaatgagtttgacggctgcttccgcctgatggcgtccgatattcagttcttccgccagttttttaataatatccatggtaaacctcgcatatctgtaatctaactaactgttatattatagtgcatcccaaccgcttatgcaagttctggccgaaagttccccgcatatggaaagcttcttcatctggacagtgccggtaattcgtgataaaatagccaggatagcagttacaatatttcggcacggcagaaacggccgcgcctgacaaaagaaaggtccttattcagaatgatgaatgatactcataacaaccagaaaccgccttccaacaaacagggaaagaacttcacgtcctccgagcgcctgggcacctgttccatgatagcaggcattatcggaatcgtgtgcagccttttctatctgcccatgtcactggcctataaccagaccgccatgcccacaggccttgtctgcggcgtcatcggcatcctccttgccctcatggccagaaacgccgatatgagccccaggaaagcctttaatgccagggccattgcagggctggtgttaagcgtcattgccatcacccttacatttttctttttctatgccctggccagctactatgaggctctaagcgaccctgtgaccggtcctcagattaatgagttcatcaaccgtctccaggaacagctgaaccagcagatgcagctgcccaaaaccaccggctttatctggttttagtgcctgctccgtccccattgacgccggtttccattctattgctgccggttctcccttcgttcatccggctcagcgcggccagagcggaagcaggtccacgcctcttaccaccagcatatagttcttgtacacccagttcgccagcgcaatggctgcaccggtgtagaccagaaatttctcatgccccagataatatctggggttttttgctgccctggacaccccgaagcttaccagctcagccgtcagcaccactgccatataggcaaccagggggtggtaccggatgctcaggagcagattgcccgcaagcagcgcccggaacgctctggtgccgccgcagcccggacagtaaagacctgttaaaagatgaaacaggcagggaaatccctgccttgtaatcacaccgataatccggcttataaccgatgccatatgctacagcaccgcacgtatcatctgcttgataccgtattcagaccgctcccgttccctggcgtcataggaaacagcccctttcttaaattctccctccgtcatctgggcggttaggaaagcaaattcatccattccgtagagctcgattacctccacctggccaaaggcgctcttaacatcctgctccttattgcggtaggaaccagccaccctgacaaagtacctgaactgtgcctggtccatggattcaatggcctgtttttccccggtccagcccatgggcacgttccttttaagattctgggccgcttcaatgatatcagccaccaccgcgctgcctgtgggaagctttccggcgccgctgccgtagaacatggaggtccccagcatattgccctttactaagataccgttaaatacatcatttacagagtacagggggctggtcttattgatcatcaccggagccacataggccagaaccctgccgtcctttatacggctggttccgaacagcttcaccgatgtccccatcttctccgcgtatttaaagtcgatatccgtaatccgcgtaatgccctcggtgtaaatatcctcataatccacttcttttcctgttgccatggctgtgagaatggcaatcttacggcaggtgtcatggccttccacatccgcctccggattgcgctctgcatatcccaggttctgggcttccttcagggcattttcaaaggattccccctctttgtccatcttggtcaggataaagttggtggttccgtttaatatgcctgtgatttcctcaatgcgctctcccatgagacagcggtaaagaggacggataatagggatacctcctcccacgctggcctcaaaaaagaaattcacattctttctcctggcaatcgccagaagctccgtgccatgggctgccaccagggccttattggaggtgaccacatgcttgccggccataaggcaggccttcacgaatggataagcgggattcagtccgcccatggtctccaccacaatcttcacttcctcgtcctgctgaatcaccttgaaatcatggacaatcttgtctgccaccggactgtcctggaactcccttaaatccagaacatactttaactccacttcctgtcctgcctggcctgctatgacatccctgttcttgtcaaggatctccgccacgccggaaccaatggtaccataccccataactgctgtcttaatcataatcttccgctccctgtgttttattctcctctgatattgaaaggcacaacccggtcattactccctggcaagtattttgacgtaatggattccgtccaatacttccagttcctctatcatgctggatacattgcctgtattctcccttacctccacgctcagcgtaagcgttgccacgccgttgaccggaatgctctggtgaatagtcagtatgttggccctgtacacagccaccacgtgaagcaggtcactgagaagtccctgttcatcatccatctgcaccaccagggtaatagttttccccttggtgttgtcatagaagggaaatatgtcatccttgtacttataaaaagaactccggctgattcccaccttatccgtggcttcctgcaccgtaatggcccgttctgtctccagaagcttcttggcctctacaaccttcaaaagaacctccggcacggctttctgcttcaccacaaagtatttgcttttgtcttccattgtccaatcctttcgtaggtccggtgtatgtccgcattggaaatacatctgtactcatgaggaagatattaacacatttttattttaaatgcaactgtttttctctaatttttcttgatatacagagaatgagggatacacaaaggaccggaattttccggtcccctgcgcattggttctattcttatgcctcatcttcccttacattcttatccgggcatcccagactcatccagcgaagataggcgctgataaaattatcaattgccccgtctaacacagcgtccacattaccgctctcctcgcctgtacgatggtctttgaccatggtatagggctgcagcacataggaacgtatctggcttccccatccgatgtccttcacatccccgcggatgcctgctgccttggccgcctgttcctcctgttttaccataaggagctttgccttcagcatctgcatggccttctccttgttctggaactgggaacgctcattctggcaggtcaccacgataccagttggaaaatgggtaatccggatggctgaggacgtcttgttgatgtgctgtccgccggcgccgctggagcggtaggtgtccacgcggatatcgtcggggttcacctcaatatctatgtcctcctcaatattgggcataacgtcgcaggacacaaaggaggtctggcgtttgcccgcggaattaaagggcgatatacgcaccagacggtgcaccccgtgctcagaacgcagatatccgtatgcattctcaccgtcaatctgcacggtgacagatttgattcccgcttcctcaccgtccaggaaatccagcacatgggccttaaagcccttgctctcagcccagcggcagtacatgcggtaaagtatgctgcaccagtcacaggactcggttccgcccgcccctgcgttcaggcgcaggatggcattattggaatcatattcccctgagagcagaagcttcatacgcatattctccagggtttccttaaactgttccagcatctcctcaatctcaggaatcagggaggaatcattttcctcgtatcccatctgaatcattacctggatatcctcatactgctgttccaatgcccggtaggtgtccacctcatccttcaggttcttggactcccttaccatcctggtggactgttccggctcgtcccagaaaccaggctcctccatggacttatctaattccgcgattcttctgaccttgttgtccaggtcaaagtgaatccctcacttccactaatggtttgtcatacgtcgataacgtatacttaaaattgtctaactctaccacagcttcacccactttcaatctatattttgtgagcccctgttcagggctgtttcatggttatatgcagccattttcataaaggccggtgttcagatgatatcacaccggccctggtaatacgtcgattatttaattcttccgtggcactgtttgtacttcttgccggaaccgcatgggcatgggtcgttggggtatatcttctgctctgcacgcttcttgggagcgcttggggcagatgcgtccttattggtgccggtcaccttggcagccgcttcacgctctaccttctgctctacacggatatggaacagaatccggattgtctcctcctggatggaagccatcatggattcgtacatctcgtaaccctgcatcttatattcaaccaccggatccctctggccgtatgcctgaaggccgataccctcacgcagtgcgtccatatcgtccagatgcgccatccatttgttgtcaattaccttcagcagaaccacgcgttcaatctcacgaatctgctcaggctcagggaactcagcttcctttgtctcgtaaagcttgatggcctcttccttcagattgtgcttaagctcattctttttcatggacttcttctgttcgtcggaaagagttaccggcttcagaggaatgaccgggagaaggaggttgttcagttcctgtaaatcccacttatccggagtctggtcatcggacacggagatatccactgcattctccactgtatccgtaatcatcttgagtacaagatcgcgcatgttgtcgccgtccagcaccttgcggcgctctgcgtagataacctcgcgctgctcattgttgacctcgtcaaatttaaggagctgctcacggataccgtagttgttgctctctatcttcatctgtgccttctcgatggcattagacagcatcttatgctcaatctgctctccctcaggcacacccatggcctcaaacatagccataagacggtctgaaccaaagagccttaaaagatcatcctccagggacaggtaaaacctggactcacccgggtctccctgacgtcctgaacgtccgcgcagctggttgtcgatacggcgtgactcatggcgctccgtaccgataatcttaagaccgcccagtgccttggtctcctcgtccagcttaatatccgtaccacggccagccatgttggtggcaatggtaacagaaccgtggatacctgcatctgctacgatttcggcctccagctcatggaacttggcattcagcactttatggggaattccctttttagtcagcatcttgctcagaagctcggaagtctcaatggcaatggtacccaccagaacaggctgtcccttctcatgtgctttctccacctcatccacaactgctttgtatttttctttctttgtcttatatacagcatcctccaggtccttacgaatcataggcctgttggtggggatgacgataacgtccatggcatagatgttgcggaactctttttcctcggtctgggcagtacctgtcataccggccttcttggtgtacttgttgaagaagttctggaatgttacggtagccagggtacgggactcgcggcgcacatttacatgctcctttgcctcgattgcctgatgcagtccgtcggaataacggcggccgggcataatacggcctgtaaattcatctacgatcaggacctcgtcatcctttacaacataatccttatccctgaacatcaggttgttggcgcgcagagccaggataatgttatgctgaatctccaggttctcaggatctgccaggttttcaatatggaagtactcctccaccttcttgacgccctgttctgtcaggttgaccactttatccttttcatccacaacgaaatcgcctgtctcctcaatctcctcgcccatgatggcgtcaatcttggagaattccttggacacagtgcccctctccaactggcgggccagtacatcgcacacctcatagagcttggtggatttgccgctctggcctgaaatgataagaggcgttctggcctcgtcaatcagcacggagtcaacctcatcaataatacagtagtccagatcccgcagcaccagctgctctttgtagatggacatgttgtcacgcaggtaatcgaatcccagctcattatttgtaacgtaagtaatgtcgcaggcatatgcctccttacgctgttcgcttgtcatgtcgttcagtacaacacccacggtcatgcccaggaatctgtggacctgacccatccactcagcatcacgctttgccagatagtcattgaccgttacgatctgaacgccttttcccttcaatgcattcaggtatgcgggacaggtggataccagcgtcttaccttcaccagtacgcatctctgcaatacggccctgatgcagtacgataccgccaatcagctgtactgggaaatgctccatattcagagttcttcttgccgcctcacggactgtggcaaatgcctccggcagaacgtcatccaaagtggcgccatctgcaagcctttctctaaagattctggtctggtcacgcagttcctcatccgacatggccatcatctcgggacgcagtgattcaatctttgtcacgattggccttatcatcttcagttctctttcactgtgagtcccgaacaccttttcaatcaagttcatggtatactctcctaacttcttcctatataatagaaactaattttcaaccagcgcctgtatctgcagcatctgccctaccatctattatctgcctgctgattcctgtctattccttacctttcgcaatgcctttcattgcggacctttcagataaaatactacaaatactacgcctatgatacaatcttacttattgtagcacttgggaaagattaattcaacgggttcatgaaaaattaacattttgtccatatacgttcctgctttgaatctattttccccaaacttatggtcaaccaagcagattgcacaaaaaatgtgttcgattttttacct

SEQ ID NO: 3160 - DNA, 207 bp, Unknown
  gut microbiota DNA sequence
ttatatcgcctaaaaagcaaaatgtcaacacttttcgagaaaaaatctttggaaatttttttgccgggagtttcatggtttttagttgtggctccttttggaatccctgcgtccgcggctgcctgttcctgtgagaaacagacagctgcggatgtgtcctcttttgggaggttattttttatccttgtcctttttggccttggctga

SEQ ID NO: 3161 - DNA, 6076 bp, Unknown
  gut microbiota DNA sequence
ttttttcattttgttgtgcggctgtctcaacagcacgttcgccattatatcgcctaaaaagcaaaatgtcaacacttttcgagaaaaaatctttggaaatttttttgccgggagttccatggtttttagttgtggctccttttggaatccctgcgtccgcggctgcctgttcctgtgaaaaacagacagctgcggatgtgtcctcttttgggaggttattttttatccttgtcctttttggccttggctgaaccggagcccaggagtttgccgacttccttaaaggaacggttgaaccggagagcctgtttgtttaagtctgtcttatcgctggtggcctggagcagttttttggtgattcccggagggagtgccatgctgtccgcctcctgatggtatcctttacctgtattctatgccgggtcctggccgaaggttcctgtccgccgggcagtgagcttgcagatgggcttgccctcggaggcgaatttcatctcatactctgtcatcacatttccttctgccatggggctgttgtgaagatcaaaggtatactctgtaatctcccagccggcatctggaatggattccagggaatattcaaacagcccgcggttatctgtcttgaattcaacaacaccctggggcgccagaattttgtcgtatacagacataaagacaggggatgtgagccttcgcttggcatggcggtcctttggccatggatctgagaagttcaggtatatccggtccacctcgccgggggcaaagatctccgccatgtcctttgcgtcgatgcacataaaataaatattttcaaggtccatttcgctgcgtttctgaagtccccgcagaaggacgctggaatagcgctcaattccaatatagttgatatccgggttggcggatgctttgtccataataaaacggcccttacccattcccacctcgatttcaaggggatggctgccgccgaatacctggttccatgtgccgcggtgctgttccggctcctgaatgacaaatgggctggaggcaatggtttcctcggcaccctggatgtggcgtaatcgcatgtgtttcatcctttcgtgaatatagttgctgcaggccttattttaacattcaaaagatgcatttgcaacaaaatttacttttttcttatttttctgattttttataattaatagtgcaaaattagcaaaaatctagtatactatacataataggcggatatctgcgatactaaggaggaaggcttatgtcgaatgtggagcggacgaccagctggcagcagattcagcagggcgttaaggaagcagagcgattaattgcgcgcaaggaatataatcttgtgatggtcagagccagacaggttctggaatatatggtaagatgcatggctgagagagcgtgtgtggtggaaggggatctgtccgataccatagaccagctgtacgaaggccagtggattaacaaggccaccaaggacaattaccataccatccgtatactggggaacaaggcggttcatgagggggatgacacggcgtatgacgccaaccaggcattccagctgctgacccaggaagtgtatgtgtttgccaatgaatttgcaggaggttcgggcggccgtccggtcagaacgtcctcggctgcaaggaatacatcagggcgcccggcgcccaggcagggaaccggcggaggcaggagcgcttccggcaggaacagccagagggtacctgccaggaatacccgcagcggcccgtcccgccagggcggacccaggaagaagcgcagacgggtatcaccggcagcatacatactgagactgctgattccggtgctgctggttatacttctgattgtggttatccgtgttttcacgtcggataagggcaaggatgcagataagaccaccacagttccgactgtgaccactgcgcctgtggagcctgcacctacgctgccgccggaacctgagacagagcctgagacagagccgcctgcagagacctacaggattaagggaagcagtgtaaatgtccgcagcgagccatctaccagcggccggattctggtacagctgggcagcggcaccgaggtggtgtacgtgaagcggtatgacaacgactgggcagtcattaactacgatggccaggaggcgtatgtatccagcaaatatattgaaaaggtagaacccgtggcgtcaaccgggggggagactgagggcagcgaggcccagacagccaattaggctcatgtatttgtgaaaattgtataggaaaaattggtaattttggatgcaaaaagaggaagaatttaaaaagttcttcctctttttggcgttttgcagtggggaaattgtgaaaaattaattttaaaactaaaatacctctggtttttttctaaaaaaggagtatcatgaaatgatatgaaaatatataaggaggagagctatggatactgtgattaaccgtttatcggaaatcgaagcagcggccggagccattgtggaagaagcgaatgcacgcaagaaggcatttgccgaggaaatggacgcaaagacggctgcctttgataagagtatggaacaggaaacggcccgcaggattgcagagattcaggagaagatggaggcggacatgaacgggctccttgcaaagcagaaggcagaatcagaggccctgcttaaggagctggaagataattataaccggcaccatgaagaatatgcagaggctctgttccagaagatgataaaggggtgagattatgggcagcctgattgcttacagcggcattgccaccaaggtgaaggcaatggaacgctggcgtataaaagatgagcagttccttgagatggcggccctggaaaccgtaccggatgcagtgcagtacctgcgtgcctttctgccttaccgcgagatattcggccaggtggaggacaaggatctgcacaggggaaacattgagcagcatctgaatctgtcccagtacagggattttgcaaagctttaccagtttgccaatataaagcagaggcgtttcctggacctgtacttcatgcattatgagattaccattctaaagacctgtctgagaaatgcggcaggccacagggaacagaggcaggacctttccatgttccgtgatttctttgagaggcattccgcccttgacctgatcacgctttcccagtcccaaagcatggaagagttcatagggaatctgaaggggtccgtgtattacggcccgttgtaccagatgcagcagaacggcagggtaacccttccggcctgtgagacagccctggatatgctgtatttcaggtccatgtggaagattaaggacaagtacctgtcaaagaacgagcagaaaataatcgcccagtgtttcggcaccaggatggatatgctgaacctccagtggatttgccgttccaaaaagttttaccagctggagccgggggagatatacgccatgctgattcccatacagctccatctgaccagaaaagagattaaccggatggtggaggcggagaatctggatatactatacggactcataggagcgagctggtacggcaggactggcctggtccatctggaccaagatcaggatctggaccatctggcccacgatataatagacaggatttacctgaagacaagcagaaaagacccatactccatcgccatactgaattcctatctctactttaaggagagggaaatccagcgtatcatcactactattgagaagatacgttatgggctgggagcaagttgactaaagggggttaagacgtgattgagaagatgaagttcttaagtattaccggccctaaggaggatattgaccgggtggtggacacttatctgtcaagatatgagatccacctggaaaatgccctgtcggagcttaagacagtaaaagacctgaggccttatattgaaacgaatccatataaggatgtgctggaaaaggcccaggggctggtggaaagctatcatgacctgataacggaccagacgggccggaacatgaagctggaggaggccgttgaggttattaacagccttgacacccagcttaaggaactgacagaccaaaagaacgtcctggtgcaccagcgggacgagttaaaggcttccagggacagggttataccctttgcagggcttaactacaatgtgaaggagatacttaagttccgtttcatgaagttccgtttcggacgtatttccagggaatattatgagaaattctcatcctatgtgtatgagactatagacacggttatgttcaaatgcgaggaggagggagactatgtatgggtggtctactttgtgccggagagcctggcggacaagattgacgccatctatgcatccatgcattttgagcggtgtttccttccggatgagtacgagggcactcctgtggaggcaggacatgtactggacgacaggatagggagccttcagaaggagatagacgaggcggacaggaatatcgtggaggccatgagcagcaggaaggacgagtttgccgctgccttaaggcgcatcaggacattttccaccaactttgatgtgaggaaaatggctgccgtcaccaagcatgacacccataacttttacatcctgtgcggatggatgacggagaatgatgcaaagaggttccagaaggaaatcgaacgggacagcgataccttctgcatcattgaggacgatcacaacaatatcatgagcactcctcccaccaagatgaagaatccggggctgttcaggccctttgagatgtatgtggagatgtacgggctgccatcctataatgagctggaccccaccatactgattggcattacgtattccattttgtttggtttcatgttcggggacgccgggcagggactgtgcctgctgattggaggatttctgctgtaccggtttaagaagatacgtctggcaggaatcatttcctgctgcggcgtgttctccaccatattcggactgctcttcggaagcgtctttggatttgaggatatcatagatgctgtgtggctcaggccccaggaggccatgacagatctgccctttatcggcaggctgaacacggtatttgtggtggcggttgccattggaatgggaatcatccttttatgcatgattctcaatatcatcaacagcctgagaacccatgatgtggagaaggcgtattttgacacaaacggcgtggccgggctggtattctattttgccctggcatccgtgattgtactgtatatgaccggaaatccgcttcccgccaccgtgattctggtaatcatgttcctgattccgcttctggtgatattctttaaggaaccgctggcagccatattggagaaaaaggcggaacggatggaaaccggcctgggaatgtttatcacccagggcatatttgaactctttgaggtgctgttaagctatttttccaacaccctttcctttgtccgtgtgggtgcgtttgcagtgagccacgcagccatgatgcaggtggtcctgatgttagcaggggcagaggcaggaggaaataccaactgggccgtggtggttggcggcaacctgtttgtatgcggtatggagggcctgattgtgggcatccaggtactgcgtctggaatactatgagctgttcagccggttctaccgcggcagcggcagggcatttgaaccgtatggaaaggctgccggagagcagtaagcatatataatacaaaaaggagatatgagatatgagtttattagttaaaattacactgagcgcagcacttattttaagcattgcagtaccttttggagcatttgcagcaggggaaaagacaaagggacgctataggacagccctggcagccaatgtattcctgtttttcggcaccatggtattcgcggcagtggtcatgttctccggcaatgcagtggcagccgagacaggagcccaggcagccggttccacggcaggcatgggctatctgtcggcagcactggccacaggactttcctgtctgggcggcggcatcgctgttt

SEQ ID NO: 3162 - DNA, 4625 bp, Unknown
  gut microbiota DNA sequence
cggcagccgagacaggagcccaggcagccggttcatccgcggcaggcatgggctatctgtcggcagcactggccacaggactttcctgtctgggcggcggcatcgctgtttccgcagcagccagcgcagcactgggagctatcagcgaggacagctccatccttggtaaatcattaatcttcgtaggtcttgccgaaggtgtgtgtctctatggtctgatcatatcctttatgatcttaggaaagctgtaatcccatgaagatgtaccttatcagcgacaacatcgacaccctgaccggaatgcggctggcgggagtcgagggggctgtggtccataagagggaagaactgaaggaagaactggataaggccctggccgacaaaaccatcgggatcatcctgctgacagaaaagttcggcagggaatttccggagatcatcgacaatgtaaagctggagcgcaagcttccgctgattgtggagattccggaccgccatggaaccggccgcaagccggactttatcacctcttatgtgaacgaggcaatcggactgaaactgtagtaatgatagaaagagggtgaatcagcttgacaacagaggaaaagctaaagcatttccaggatatctgcatgacggatgccagagagcgcagcgccaggatgttagatgactatatgaacgccctggaggctgcctttgaggagcatgcggctgacgccaggaggcgggccgacatgcaggtggaggcagagacagagaagctggagcgtgagatcaataaaaggctgtccatcggccagctggatttaaagagggaggccagccacaagcaggaggagcttaaggataagctgttcgtggaactgcgcgacaaactggccaactttatggagacacaggattaccagcggcttctggaccgccaggtaaaggccgccaaggaatttgcaggggatgaggaactgattatctatatggacccatcggatgtggataagctgcagcgcattgccatgcaccataacgccaccatcaaggtcagcgaatattcctttaacggaggcaccagggctgtgcttccgggcaagcatatacttatagacaactcattccagactaagttaaacgaggcccgccatgagtttaaatttgacttgacaggaggtaggcaaagtggctaagacaggtgtgatttacggtataaatggtcctgtcgtttccctgctgggcgactcagggttccagatgaatgagatggtgcatgtgggccaggagaagctggtgggggaggtcatcggactgaactcagagaagaccaccattcaggtttatgaggagaccagcggaattaagccgggagaaaccgtgactggtacaggcgctcctgtatccgttacactggcgccgggaatcctgagcaatatatttgacggaattgagcgtcccttaagcgagattgccaagggaagcggatattatatcagcagaggcatatccgtcaacagtctggatacggataaaaagtgggatacccacatggtggtgaaggaaggggacagaatcatgcccggcaccattattgctgaggtgccggagacaagggctatcacccataaggtcatggctccgccggacgcggaaggctatgtccttacagtggtgccggacggccggtacaccatagaggagccgcttctgacccttcagctcatggacggcactgagaggaccctgaccatgacccagaaatggcccatccgcgtggccaggccgtctgccaggcggttcccggcagtgaagcccctgatcacaggccagcgtattctggacaccatgtttcccctggcaaagggcggcacggcagccattcccggaggcttcggcactggcaaaaccatgacccagcaccaggtggcaaagtggtcggatgcggatgtcatcatctatattggctgcggtgagcgcggcaacgagatgacccaggttctggaggagttctcagagctcatagacccaaagacaggaaatccgctgatggacaggacgaccctgattgccaacacatccaacatgccggtggctgcccgtgaggccagcctgtattccggccttaccctggccgagtattacagggatatgggataccatgtggccattatggctgactccacctccagatgggcagaggccttaagggagctgtcaggccgtctggaggaaatgcctgccgaggaaggtttcccggcttacctggcatcccgcctttccgcgttctacgagagggcgggcatgatgcagaacctcaatggaacagaaggttccgtgactatcatcggcgcggtgtcgcctcagggaggcgatttctccgagcctgtgaccatgaataccaagcgttttgtgcgctgtttctggggactggataaatccctggcttacgccaggcacttcccggccatccattggcttaccagctattcggaatatattaacgacctgtcctcctggtacatggacaatgtggataagcggtttgtggacgaccggaaccgcctgatggcacttctggtgcaggagagcagcctgatggagattgtaaagctgattggagccgacgtactgccggatgaccagaagctggtgcttgaaatcgcaaaggtgatccgtctggggttcctgcagcagaatgcattccacaaggacgacacgtctgtgcctctgattaagcagtttaagatgatggaagtcattctttacctgtataaaaaatcacgttcccttgtgtccatgggcatgcctgtgtctgtgctgaaggaggagaacatatttgacaaaatcatatccattaaatacgatgtgcccaatgaccgcctggaaatgtttgatgactatatgaagatgatagacggtttctacgacagggttgtggaacggaacgcgtaagggagggaggtccatatggcaattgaatatttaggtttaagtgaaatcaatggccctctggtggtcctggagggcgttcagaatgcggcttatgatgaaatcgtggaaatgaccgtggccggaaatctccacaagataggacgcatcattgagatatacggggacaaggccatcatacaggtgtttgagggcacggacggcatggccctgcgcaatacccatacaaggcttacgggccatcctatggagatagaggtttccgaggagatgctggggcgtacctttaacggcatcggccagcccattgacggtctgggtgacatcatatccgacataaagctggatatcaacgggaaacccttaaatcctgtgacccgtgagtacccgagaaactatatccgcacgggaatttcagccattgacgggctgaccaccctgattcgcggacagaagcttcccatcttttcgggaaacggtcttccccatgaccagctggctgcccagatcgtgcagcaggcctccctgggagagaattcggatgaggaatttgccattgtgttcggcgccatgggcgttaaatatgatgtggctgatttcttccgccgtacctttgaggagagcggcgtatccgagcatgtggccatgtttatcaacctggccaacgaccctgtggtggagaggcttatcacccctaaaatcgcccttaccctggccgagtatctggcctttgaaaagggaatgcatatactggttatactgacggacatgacctcctatgccgaggccatgcgtgaggtctcctcctccaagggcgagattccgtccagaaagggatttccgggctatctctacagcgacctggcttccctctatgagagagccggcattgtggcgggacggcctggttccgtgacccagataccgattctcaccatgcccaacgatgatatcacccatcctatccctgacctgacaggatacattacagagggccagattgttctggaccggcagctgaacgggcagaatatctatccgcccatcaacgtgcttccctccttatccaggcttatgaaggacggcatcggcgagggctacaccagggcggatcatcaggacgtggccaaccagcttttctcctgctatgcaaaggtgggggatgccagagccctggcatcggttatcggcgaggatgaactttcacccattgacaagaaatacctggagttcggcaaggcctttgaggagcatttcataggacaggccccccatgagaaccgcaccatcctggataccctggatataggctggaaacttctgggaatgctgcccagggaggaactggaccgtatcgacaccaaggtgcttgaccagtattataaacctgcggataccatgaaggagtgatgtaaatggatccaaatacatttcccaccaaaggcaacctgatagcggcaaagaattcactgggcctggcctatatgggctacggactcatggataagaagcggaatatactgattcgggagctgatggagctgattgacgaggcaaagggaatccagtcagagatcgacagcaccttccgggaggcttatgcggcgctccagaaggccaatattgagctgggcatcaactatgtccaggagataggcgcctctgtgcccatagacgaccgggtg

SEQ ID NO: 3163 - DNA, 12542 bp, Unknown
  gut microbiota DNA sequence
taccttccgggaggcttatgcggccctccaaaaggccaatattgagctgggcatcaactatgtccaggagataggcgcctctgtgcccatagacgaccgggtgaaaatcaaggccagaagcatcatgggtacggaaattcccctggtccagcatgaatcgcagcctttggccctgacctatggtttttataacaccaccgagtccctggatgaggccagataccattttgagaaggtaaaggaactgaccatcaagctttccatggtggagaattccgcctaccggctggccaactccattaagaaaacccagaaacgggccaatgcccttaaaaacatcaccatacctcattatgaggacctgagcaagtccatctccaatgcgctggaggaaaaggagagggaggaatttacccgcctgaaggtaatcaagcgcaataaagagaaggtgtaggaggtttttatgtatacatttgatgaccttgtgggaataatagcaaagctgcggtcgcctgagggctgtccctgggacagggagcagacctttgagagcctgaaaaaatgtctggccgatgagaccgaggaagtattccaggccatagacaacaaggatatggaaaacctgtgtgaggagctgggggacgtactgctccaggtcatcctgaacagccagattgcaaaggaagaaggcaggtttacgattgacgatgtaattgacggattatgccggaaaatggtacgaaggcacccccacgtatttggcggtgtaaaggtgaattccgtggaggaaggaaccgccctctggaatcagataaaaatgcaggaaaaagccaaaaaaccttgacaaatcatagtaaaacagatataaatgattaagtacactatgactttaaaatgtaacgattccggggcctttcccggacaatatctaggaggaaaaattgatgaacaagacagaattaattgcagcagttgctgagaaggcagagctttccaagaaggacgcagagaaggcagttaaggctttcacagacgctgtatctgaggagctggttaaaggcggaaaagtacagttagtaggcttcggaacctttgaagtatctgagagagctgcaagagagggaagaaatcccaagactggtaagacgatgaccatcgaggcttccaagactccaaagttcaaagctggcaaggcattaaaggatgaggttaataaataatccatgagattggacaagtttctgaaagtttcccgccttatcaagcgcaggaccgttgccaatgaggcatgcgacgccggacgtgttctggtaaatgataagccggcaaaggcgtccgtcagtgtaaaaacaggtgatatcatcgagatccagttcggagccaaggctgttaaggtggaggttctggacgtacaggaaactgtgaagaaggatgaggctaaggaactttaccgttatatttagcggcagtttgcattggatgttttaactgctgcaatatttaagataagtggcatagaatggccaacctccccatatatttaacataggttagatatacggggaggttttttgcatggaagaaaagattggaagcaatcgtcagcataagcttatactgcagaaccggggcaagggaaacataaccggcatatgcgatgtggtgtcttttgatgaaaatgcagttgtcctggacacggatatgggtctgcttaccatcaaggggaaggagcttcatgtaagccgcctgaccctggaaaagggagaggtggacatagagggaaccatagacagcatggtctacagttccaatgaagccctcaggaagtcgggggaatccctgttcacccggctgtttaagtagggggcatcatgagcagcaggattcagtatgaagcctggctgatggtgctcagcctggtcacaggcggttggctcatgctggcctatgataccctcagggtgttccgcctggttatccgccacggccccttctggacaggggtggaggattttttgtattggctttatgcggggctggtgacctttattcttctctatgagcagaatgacggcgtgttcagggcctatgtcataggaggggtatttgcggggatgattctgtatgacaggtttatcagcagaattttctttaagtgcttgaaaaaggccggcaaatgccttagaatgattattagcaggcacagacagaaagctgtctgcagcccggaaaaagacggagctggtgattgagcagatgaaatcctacggtaaatcaaggcgtgtaaaacgcgataaatggacgaaccgcatggccatcatgggtattaccctggtagtcatgtttttggctgtggcaatcaatataaagggcgctgatcttaagaaatcggacctggaatacagcatccgtgaacagaacctggagcagcagaaggaagaggaagaaaagcggactgctgagcttcaggaatacaagatttacgtcaagaccaagcagtatgcggaggaagtggccaaagaaaagctggggttagtgaatccggatgagattttgttaaagcccactgagtgatggcgaaaacaggcgaacgatttttaaaaattcatgcatgaattgacatatatttccctcctgggtgcgtatactgaaagttacgcggattaggagggatttttgtgtttatcagagagcgggaagtaaagggaagaacagatgtaaattattatacggccaggagactgggggatatggcagagtccttaaaccagctggccagagcgtttgacgacggtatagagaaaaacggacagctgacaaaggacgatggactggccgccatgcaggccagcgctgccctggtgtgcgacaactgcagcaggtgtaatctgtatgcggacagcgagaaggaggacagctattacctctattatcttctgcgggcatttgagcagaagggacatattgattttgaggacatgcctcagatgtttcagagcgggtgccggaaaaaggaggattatcttgcccagctgaaccggagcctgggaagggctaccatgaatctgtcctggaagaaccgtttcctggagagcagggacgcggtcatatcccagttcagggaactgtcggtgatactggaggaattttcccaccagattgaccgtgccagggatattacggatgagtatgaatacatactgaaaaaatattttaaacgctatcatgttgccctgggcaacctgctgttattggagtacgagaacgggcagaaggaagcttttttaacggccaggaccaccaacggccgctgcattacatccaaggatgcggcgctgatcatgggagaggtcatggatgggacaaggtggagtccggccaaggacagccgcagcattatcaccaagcagtatgaaaccgtgcgttttctggaggagggagggtaccgtatgctctatggagcatccaggattcccaaaaagggcgaaaagtattccggggataattataccttctgcgaaagtccgggaaaccaggtggttatgagcctttccgacggaatgggaagcggggagacagcggccagggagagcaagcaggtggtggaactgacggagcagcttctggaaaccggattttccccaagagccgctcttaagctggtgaatacagtgcttttgctggctggtccggaacagcacccggctactctggatctcagctgcatcgacctgcataccggcgttctggaagctatgaagctgggagcagtgccgaccttcataataggagaagagggagtggaaatcatggaagccggagaagtgcccatgggaatactgagcggggtggaacccgttctcatgtccaggaagctgtgggagggcgaccggattgtcatggtcagcgatggggtgctggatgcattgccgggagatgataaggagcaggccatgcagcagtatctggagagcgtggaggagatgggtccccaggaactggcggaccaggtactggattttgcggtatcctttattcccgcgccaagggatgatatgacggtcctgacagcaggaatctggaaaagacgctcataatttacaatgacaggcttgcaaggagggacgtttgcgggtatattataagaaatagacagagataaacaatatgggacacaggagagacaggtggaaggactggagcacagggtcagggagaccatggaacaatatcatatgctggagccgggtgaccgggttattgcagcagtttcaggaggggcagattccgtctgcctcttagcgttgttatgcgcatggagggaaccgcggggaatcagtatcagggcgctccatgtccatcacgggctcaggggggaggaagctgatcgggatgcggattttgtcaggtcattgtgtgaagggcttcatgtcccctgtcatatcctaaaggtagatgtgcgcggcctggcggctgaaaagggcatgtctgaggaggaggccgggcgttttctgcgctatgaggcattggagaaggaggccctggactgggaaggcgaggaccgggccagcggggccaggagcggacaggacggagattgggcacatggcggttcggcggacggaggtccggtagatggagatttggcggacggagattcggcggatggagatttggcagatggcggtttggctggcagcagtctcagtcccgtgaaaatcgcggtggcccaccatagcggggaccaggtggagacgattctccacaatctgttccggggaagcggtctttttggaatgaaggggatcgtctaccggagaggcaggattatccggccgctgctggacgtggaccgggactgtatccttaagtggctggcggaccatgatctgccctatgtgcaggattccaccaacgatacccttcactacacgcgcaacaggatacgcaatcagctgctgccggagattgagcagtatgtaaacaggggagccgcgggcaatatactgcgtctggggcgtctggcggcgcaggcagacgagtacctggaaagccaggcggctgcctggattaaggcccatgtgaggaaaaacccaggggcatacattccggccgaggcgtttttgcaggagccggagatactgcggtcctatgtggtgatgtcgctccttaaggagctgggaggagcctccagggacctggggctggttcatgtgagccaggtcatggagctggccgggcgggccgtgggaaaacaggtggatttgccctacgggctgtcagccataagggagtacgagggaatctggatgggcagaggagacccggcgtcagaggaagaatggggagacctgcctattgtggatatggaggttttttctcggaaaaaagggatggaatttcctaaaaatgtgtatacgaaatggtttgactgtgataaaataaagggtacgcccgtggtgagaaccaggcgtccgggggattttatcgtcctgtcggacaataaccacaaggcgcttaatcgttttatgattgatgagaagatacccagacagatgagggataagataccccttctggcagatggcagccatgtgatgtggattataggataccgcatcagcgagtattacaagataggaccggatacggtccgggtgctgcaggcagaggcaggccagactggagagagaaaagaataggtgaaacggaggataaggtaatggctgacagaattcgtgttttattgacggaagaggaagtcgataaaaggattaacgaagtagcggcaaaaatcagcgaggattatgcaggaaagcaggtccacatgatatgcatattaaagggcggagtattctttacctgcgaactggcaaagaggatgacggttccggtgtccctggactttatgtccgtgtccagctacggcggcggcactgtgtccagcggcgtggtcaggattgtaaaggacctggatgagtccctggaaggcaaggatgtactgattgtggaggacattatagactccggccgtacgctggcatatctgattgaggtgttgaagcagagaggtccaaagagcatccatctgtgcacacttcttgataagccggagcgcagggtgaagaagcaggtgaaggtggactatacctgttttacgataccggatgaatttgtagtgggatatggactggattatgaccagaaataccgtaacctgccttacatcggagtagtagaattggatgcagaataagaaggtctaaggaggcaattcggtgagacagcagcagacatttagaggatttatattcatacttctgatgctgatcttaatcgccaccgcggtgagattcccttacgcaaggcaggcggataaggtcacaaatcaggattttatcaagatactggaggatggccaggcggcagacgtgagcatccaccagaatccgcagactcccacgggagaagtggtactgacccttttggacggtcaggtgaagcggctttatgtttcggatgttaaggacgcacagaagcttctggaagcccatgacatggcgtatacgaccatggatgtgcctcaggagaattatctggtgaccatcatccttcccttcatgctgtctattgtggtggtggttatcatcatcatggtcatgaaccggagtgcgggcggcggaggtgccaatgccaggatgatgaactttggcaagagcagggccaggatgagccgggacagcaaggttaatttttccaatgttgccggtcttgtggaagaaaaggaagaactggaagaggtggtggatttccttaagaatccccagaagtataccagcgtgggagccaggataccaaagggccttctgctggtgggccctccgggaaccggtaagaccctgcttgccaaggcagtggcaggagaggcgggagtaccgtttttctccatatcaggttctgatttcgtggagatgtttgtgggtgtgggcgcttcccgcgtccgtgacctgttcgaggaggccaagaagaactctccctgtatcgtgtttatcgacgagattgacgcggttgcccgccgcagaggtacaggtatgggcggcggccacgatgagagggagcagacactgaaccagctgctggtagagatggacggctttggcgtcaatgaaggcattatcgtcatggcggccacgaaccgcgtggatatcctggacccggctatccttcgaccgggccgttttgacagaaaggtggcagtgggacgtcccgatgtgaaggggcgcgaggaaatccttaaggtccattccaaggaaaagcctctcagcgaggatgtggatctgcacagggtggcccagaccacgtcaggcttcacaggagctgacctggaaaacctgatgaatgaggcagccattatatccgccagggaaaaccgcaggttcatcaagcagagcgatatcgaccgggccttcgtgaaggtgggaatcggtgctgagaagagaagcaaggtaatatccgagaaggataagaagataacggcttaccatgaggcgggccacgccatcctgttccatgtgcttccggacgtgggaccggtgcacactgtgtccatcatccccacgggaatcggggcagccggttacaccatgcccctgcctgaaaaggatgagatgttcaataccaagggccgcatgaagcagaatatcatggtggatttaggcggccggattgcggaagagctgatatttgacgatatcaccaccggcgcatcccaggatatcaagcaggccacccagattgccagggctatggtgacccagtacggcatgtctgagaaggtaggaatgattcagtacggcggcgatgagaatgaggtatttatcggacgggacctggcccataccaagtcctacggcaatgaggttgctgacaccattgacagtgaggtcaagcggatcattgacgagtgctaccagaaggcaaaggatatcatcaagcaatatgactatgtcctccatgcctgcgctgatttgctgattgagaaagagaaaatcagccagtctgagtttgaggcgctgtttacaccggtgcagtagcatagtatttcggttctgttttgggctgagaatgatggaaaatagtataaaaaaggggagggaggctataaagccccctcccttgtctatattgctcataaatacactggaaaatattgcatctttgtgcacactttttttcgttcctatgctattataatagacgtaacccccccaatacattatatagtttttgctacaccccataagaaacgaaataccttctcctgaaaagcctggctaccccgccaggcttttcactttgtgagaaagccatggaaaaggtgtaatgttatcaagatttttctggtataatttttcttgtatatttgagaaaattcagatacaataaaggaacaggattgtaattatgagcaaattaggaaaaggatataaaacgtggaagataatttgaagggacgtatcaacagggatgcccttttttcctctgagacagaggattaccgcatgccaatggaaccggacgcagatgacgatgtgctgcttcgcatgcggacagctaagggcaatgtggatcatgtatattatgtggaggataaagccgaggtggagatgaccaaggccaagtccgatgaattgtttgattactatgaatatgaaattacagtaggcaccgatcaggtgctttatcactttaaagtggtatccgaacaggatgtctgtctttataaccggctgggacccacacaggatggccagccatgctttgatttcaagattaccccgggattccacacgccggaatgggcaaagggtgcggtcatgtaccagatttttgtggaccgtttctgcaatggagatgagagcaatgatgtggaatcatatgagtatgtctatatcggccgtccggtacagaaggttacggaatgggaccggtacccggccgccatggatgtggggtacttttacggaggcgacctgcagggaatctgggataagctggactacatcaagaagctgggagtggaggccatctatctgaatccggtatttgtatccccctccaaccataaatatgactgtcaggattacgagcacattgatcctcactttaccagaatagagaaggacgggggaggtctggtcaggcctgacgccacggataacaaggaggctgaccggtacgtgcagcgcagcgcaggcaaggagaatctggaagccagcgatgcattttttgcccggtttgtggaggaagtccataagcgggggatgcgggtaattctggacggagtgttcaatcactgcggctcctttaacaaatggctggacgcagagggaatctatgagcattccggcgactatgaggcaggggcctatgagagcaaaagcagcccctatcacagctttttccagttccatgacgacagcgacggggcctggccttacaacaggacctatgacggatggtggggacatgacaccctgcccaagttaaattacgagaattctgaaaaactggtggagtatatactgaacgtggccaggaagtgggtatccccgccctattccattgatggctggcgtctggatgtggctgccgacttgggacacacggcagaatacaatcacgaattctggcgcaggttccgccaggccgtaaaagaggctaatccggaagcgctgattctggcggagcactacggggatcctgcttcctggctggagggagatcagtgggattctatcatgaattacgacgcgttcatggaaccggtcacgtggtttctgactggcatggagaaacacagcgacagttataacgggggcatatggggagatggtgaggctttttttaacgccatgggataccatatgagccgtatgcagaccaacacggtgatgacggccatgaaccagctgtccaaccatgaccattcccgtttcttaaccaggaccaaccagatggtaggccgtatccagacagctggtccggaaaaagcaggacagaatataaagccctgtgtgtttagggaggcagtggtgattcagatgacctggccgggagcccccacgctttactacggcgatgaggctggagtctgcggatggacggatccggacagcaggcgtacctatccatgggggaaagaggatttagagcttatagagttccaccgctatatgaccggaatccaccgcaagataccagcgatcagaaagggtgcggtaaagccccttctggccggataccagaagattgcctacgggcgtatgtacggcaaatatcaggccgtggtggtcatatccaacagcccggacagccagaccatggacattccggtatggcagctgggcgttactgacgacatggtgttaggcaggcccatcctgaccgctgagacagggtacaatgcaggggtcatgctctaccgcataaagaatggcatgctgaagctgaacatgccgccttacagcgcggcagtattcgtttctcagccggatgaattttatccggtggtggattcgcggttcgcggatgatggggcggctgtggagaagtaggcagaaggatgatgtaagactgacaaatgttgtaagacagggggattttgaatctgatataggaaagagcacctttcggaggcggagaattgttccgcgggcggggaggtgctcttttttgatactcagaaggtggtttgttaccagagattcccctcgtcgttaaagggaagttcctggggctggctgataatttctatctggggatttttcccggcctcctccatcatgctttcagatatccatatctcgccaatctccagtgtattgggaatccgtaccatacggatatgttctaaatccacttcattacatgtcttaatacaggcagccatggcaaaatagtcgtttttaagaatcatgggaagccttacacagtcaaatacagtggaagttatggcattgatgtagcttgcctccagattggatttatccactaaacgctgggtgcaggtatctgcgcagccggctccaatcatgatgccgtggcttttgtccgacaggtccagtacacatactttttgtatggtgaaatcaccggaagcatagggagtggcaaaacgggaagagacattgggatcctggccgtcgccgctgaaattctttccaatctcatctatgaccaataccgcaatgtcatcaaagagaatccgcggcatcagtgagcgggccaataccagcagctccggctctttttcgggaatttcctcgggagtgagcgcctttagcatgtaagtgcggctgtaggcgttctccacgattcccagaccgaataagatggggcagtttgccaggatgacattggcaaacatggggacgagtcgccccatgttcttgaatccggactgatggcacaggctggccccatactgtttgcctagtccaatggtcatcattttcatgagaccgctttcataggaacctctgaaagcagtgtggggcttgattttgttaatcacgataatgccgtcagcctcccacgcgttcctatcaatatgaacatcatggccttcggggctgactccaatccggactgtctccatgccggacttaatagggcagccgagataggcgggggttatcccaaacccctctaaaacttccagctgtccctgggcagtagctcctccatggcttcccatagctggtaccacaaacggatttgccccgtgttctttgacgatatccaccactgttttcagaatcagtttatgattatgtatgccgcggctgcctgctgttatggctatgttcatgcctggcttaagggtggctgctatctccgggcgtgacagttccccgcgtatcccggctgcagggtctgtaatttcggatgggtcgaatttctggcgtacgcgggccatctttggtattttaacgttgtcgattacattgtataatgcagaatccatatttcgttatctcctttacctggttatgaaggagggcacagcggttacaaggcttttactgacctgcgtacaaccagctcggcgctgactgacaaggtaatgccattatggtcttcatttgagtttaaggagtcgatgattaaatgacaggcccgctgccccagtaatctggcaggcatgtccatggtggtaagaggcgggttaatgagtccggaataagggatattatcaaatgatatgatggaaagatcatcgggtattcccagtcctttttcctgtaagcgctggatgattccatatgcaatcaggtcattgactgccataatggcagtgtaatcttttcgcttttttgcctccaggaatttgtctgccagcttatggccggcttccatctcatatagtccggaatctgcctcggattcatactggactgtcattacatcatcctcggaaaatgaaaggccgttattagccagggccagtttgtaaccgtccagggtcataatacgtgact

SEQ ID NO: 3164 - DNA, 20674 bp, Unknown
  gut microbiota DNA sequence
aaacagtttctttattttttctgaaaaatcaatccccagcttggcagcctcttctttcaggcgttccctgtccaatgtaaaatctatggtatccttgcatgtaacctttaatgaagatgccaaagccgctaatccacccaagcctacgctggaatcatgctcgtaaaacggaactccacatatcaacccgctgataaccgtggcgaggaagcagtctcctgctcccgccgtactgttgaccggcttccatatagcaggtattcgttcgctgtagccattggcaaagaactgggctccctctcccccctgtgtaacaatcaactgaattccaggattttgactgcgcagaaacccataacactccggtgcaccactttcagcttccactccgcctgccgtcacaagggtttccatctcatgcttattgatagccaaaagatccacatattgaaaagcgcctgaacttatgcattcccccatctcgtcagaagtaaacgatgcaacattaaagcaggaattctctcttccctttttcaacagatacaggcgaatatccagaggaacctccggtgctgccagtacaagccccctgccttttaattgttcctgttcaaaaaaggcagctatatcctcctctctcatattgccgctggcactattgctggttgtaatattacctccgtcactgtcaggatatacaaagcatactgaatacatggtcttttcatgagaatccacatttacatacctgcagtttatcccgtactgctccattagtcccaggacctctctgccgctgacgtcatccccgactctgccgattgcatagacaggtatacttttattaagataggttataacataatgaagaataatgtgaagcttacagaagtcccgcacatccataagttctgccagcctggactcattccttcccaaagtgatgttatctgaaaaacggaagaggattcccgaacctatccctccggttcccaccacgtaatcgtatttcagttttctcatatatttactcctgcaaatttccattcgggatgccttgatatgggatggttggctgtctcataagtggcggtaataatggcatccccatgatcctgcagaagcgtcataggatactccgaatccttctccgaaaatagggccactcttaaagccgtttgtttccaggaacctgtatcgctgtataacctgaccttctttgctgacagacattccctgattccaagtgtaatggacataggagggacaaactgatatgctgctccataagacctttgtcccaaggtgataatggtatccaggttattctcctggatacgaatactggattccttcagttcctctatagtaatatgggaaaagggatgtcttctgctctgattataggctatgtgcccatcctgcccccatcctccaagcgtgtaatccaacggtgcctccgctattttttcttttacttcatacatattctttggggtcagaaaattcctgttggcttcaggtatatttaaatccggagcaatgggaccataaaattcacgaagcataaatgtcctaaaattatagggatcgtcctgggccaacagatttccctgccagtccagacattcatccatatggaatatagttacatgcttcatgtttatccggtttttgtttatatactcagcaaagggagcataccagcattttggcccgcatggcacaatcgcccgaaactgcctttcttctctgcccgcctgagcgatttcatcaacaagctctctggccatcatttgtcccatttcacaggaatccttcaccattctgaaccgtatgaccaactcaggatgggactccaactcttccgcaggtatactgcaccatttatataaatcttgtttttttatcatggcttagactcccgactcctctgtttctgccttccagcacaaacagggctttgtttacatctcaattagtttaatatccgttaagtaacaaaactctttcagggttccataaatctcttcatctccataggccagagttatatattcactgtcccacacctgtacaccatagtcatagtccacatccatcttaataaatgcgtgaggccagaaccacatgccggattcagtccgctggtcctttaaatcatccggatccggtgtgtaaacctgcccccggtgaagaatcatctcaaacattccgttatcacgtcctatgcgacccattacaacctttccgggttttagaactgcctctacggacaggcctccggctgaaccttctgtaggtaatccatgatgtgcaaatctggctttgtccggcccggccagggagggcgcacaggcaccatcaccaattaccttaaccacttttttctccttatcaatgcattggaaatcaccataatatactggatccggagtcagattacttaacaggaatacagtgagtacattattataatcacacagtgtcgctgtgggaattccctgctgcagcatcatactctgcgtaaagcagctggcagcatattcctctgccagaccaggaaatgactgaatgacatacatatcaaatttttctttctcaattattttttttactgctaaatacaatctgattgaacgctccgtgcaaccgtcatccgggggcatctcctgaaaatatggcttaatcagattctcttttacgtcctgaatttcttcttctgtcacttcttcggcagctttcaatatatccatggaatccctggaatcaatgtccacgccaaactctctcatgaactgtgacggatccgcacatccgcaggtcaatcccattcctcttcctccaaaggcccctatggttgtcatattcaacttattccgcagtgcgcatgcccttgaaaaacatgccaccttttcgaccgtatcattgtcacttccataaacagaacggtacttcatgccgatttccttaaaggatgcccctaatgctagggttcctaccagtctccatccctgagagcccggcacggtccagataataacacccttgccggcacgttcaaaatctcttaccgctgccacgatttctgaagcccatacccaagttccggaaaaaagaatcactccgtccacactgtcatcatgctttaatctggcaagcgcctcacgggcttcctgcttataggccactacaatttcattttctaccagctttacacctttggcctcaatggcagccttggattcatctataatcttctggttaatgaacggcactcctaaagggtcctttaacccatccttatgtaccccaaacacgataaatcccatttttggccttatcatcataattcagtccctcctgacttcaacattaatgttttctttaacaaacgaatttcctatttaaaatctgcacaaataatgatctactcggatttctgctgccgcttctgtatgaatcggtcaaatcccactgccaataacagcactaatccctttaccaccctctgccagtaatcatcaactgccatcattgtcattccattagtaagaacacctataatcaatacaccaaaaaccacatggctgatttttccgacaccgccggtaaggctgacaccccccagcacaactgccgtaatgacatccatctcataactctcaccggccctgggctgtccgctgttaagacgccccagcatgactaatcctgccagtgcactgcagaatccgcttaccgcatacacaaacgccttgattctgtgaacactgataccagacaacctggctacctcctcattgccgcctactccatatatgtatctgctgtgcctcgtctttgacaggaagaatatacctgccgcaaatgacagaacaagtatgatgaccggtatggggactgctcccacatagccctgaccaatgacagcataccgtgaatcgaatccaaatacaggagttcctcccgtaatcagatacgccacgccgcgtaaggaagtcatggttcccatggttgctaccataggaggtatccctatgtgactgataacaagcccggttgcaaaccctataagggtacataaggctagggaaatcagggatgcaataattggattaacattgtttatcatcatcattgctgtcaggacgccgcttaccccaatgattgcccctaccgataggtcgataccccctgtcaggatgacaaacgtcatgccaatagcgcagattccattgatagatacctgccttaacacattggcaatattgctacccgttaaaaaattaggtgcaaatatgctcatagccgcaaaaagtacaataaaaatgattataatggcatattctgcaataaatgtattaatattcattttattcttcatatgaataccccttctataaagctgcataattcagaattaattcctgggaatattcttcaggcatcaattcctttacaacctgcccctccttcatcacgataatcctatccgacattccaatcagctctgacatctccgacgataccattatgatgctggtgccgttgtcagccagttgtcgcatgattttatagatctcctgtttggctccaacatcaatccctctggttggttcatcaataaatagcacattgcattccgttgcaaggcatttggcgagaacaaccttctgctggtttcctccagacaatttcattactggctgcagaagtgagcttatttttatggaaaggtcagcaaccagcttattgcagatatccttttcctgcttcttcttaattacggcaaagcgggataatctgtccagaatggcaaatgatatattatgttctatgctcatacccataattacaccctgctgtttcctgtcctccggcaaaagagcaatactgtttttcagggccactgccggcgaggtaatgtttatctttttcccctttagaatgatttcaccttccgtaatttcatccgccccatagagcgccctgagaagttcagtccttcctgcacctactaaacctccgattcccagtatctccccctttctcaaaaccagtgacatatccttaagccttctgttgcttacatggctcacctccagaactttctcctcgttgatgtggcctaaatcgggaaatgtctcccccatctcccttccgaccatatctgcaatcagggtctcacggctggtctcagaaaccggatgagtagatatatatttcccatcccgaaaaactgatacgcgatcgcatatttcaaagatttcctccattctgtgggaaatataaatgatagtgattcctcttccctttaactgtcttacaattgtatggagagtctctgtctcctgttctgtcagcggtgccgacggctcatccatgataatcaattttgcattctttgagacagcctttacgatttccaccagctgctgctgtgcaatccccagtctctgaacacgaattttaggattaatggccgttccaatctctttaaacatttttttggtattttcattcatctgctcataatccaaaaaaccttgtttcatgagttcgcggccaaaataaatgttctcacttacagacaggaacggtatcagattaaattcctgataaatggctgttattcctgcgtccagcgccaatgcaggagtcaatccgctatattcctttccgtcaaacatgattttaccttcgctaggtgcgtgggcacctgtaagaatcttaataaaggtgctcttccccgccccattctctcccaccagagcgtgtacttctccccttctgacagaaaaatcaatattattaagggccttgattcccccgaaccgcttggaaatcttatggacttccagaattatatctgtatcatcaatttgaggagtttcctctaaccgattgttcattcatccacttcctccatcattcctcgcacttcattatggctagtttccaaccacatctttctgccaaactggctcataccttctctgaaccactgcatcttcctgtttttctgttaaatatttatacatagcttcggccaggtcctcacctgcttcataagggaacaggttgcaggatgatctgtaaacactgttttcaactttcattttttcttttccttcatccgtggcatcacagccgccgatataaaaattgtccggaattttctgcatggccgatactgcttcgtacgcgccgattgccgtaaagtcatcgcaggcgcatatcacatttacctcaggctttgccaacaaaacggactccgtcaccttcattcccagatctgtattgctggcattctgtctggctaccacctctgcctcaggggcgttctccaaaataccatcattgatgccgtctcctcttcggatgaccgcctccacatcatcttgagcaagaatcagcgctcttccttttccaccctgttctgctttaatccactcagcggccgcattgccaatagcatatcctatattatactcatccagagagccgtcaatctgcgcattgctcacaggctgcgcctctgcggatactacgattcccttttccttagcttggtccaccactgttttcagggcattctcatccaaaggtgatatcataattccgtctacatcacgctgtaccgcatcctctacataggaaacctgagtggctacatcatacttggaatccaagatctgtgtcttaattcccagttctgcacattttgactggaatccatcgtaaacctggataaaatacggattggcactgtcctgcgtcacatatacaaattccataccggagtctgccttattatccccaccggatgtggcggctgtatccgtatgcttctgttcagccttatcgcccgcgtttccacccgatgcagagcatccagccaatgtccccataagtgaaagaactaacaacattgctaccatttttttcttcatgaatatacctccttttggcaggaaaatgattcgaaacgtttcgattttcaggtaaacattaaggtgtttgataaacaccttaattctttatcgtttgacagtgtctctgataatcaaggatggctccaaaataactgagtcaggaacaataccatactgcaaaaggttcatcaggttattgactgccagcttgcacatacgctcgatgggctggctcacggttgtcagcggaatctggttgattgtagcgtatatgacatcatcataaccgcatacggacaaatcccttggaatagataagcctttaatcctggctgcctgaagcactgcacaagccgtaaaatcactgttagtcatgattgcctccggcctctccttcaatatctccatggccagcttctgcacatcatcaaaatgataggtactctcataaacattggactcggaataaaccagaccggcttcttctaacgccatcttataaccgctgatatatgtctcatcaacccgtctgtcgccaatcagcatcacgatgttatgaatatcccgttcaatcaagtactgtgtcatcagataggagccctttttcagattacacataacaaagggtgcgctgctctgctcatagtaggcggccagaaacagatagggtattccatattcatccagcttcttcatatgttcaatatcattgacataagtcagctgcggaacccatataactccgtcaacctttctcgaaatgaattcagaaatatactttttctcattattactgctgtttcctgtaatccctaatataagaaaaaagccgtaactttccacttctcttcgtatgtattctgtaatctcactataaaagcagtttctcacatccggtataagcagaccaattacctttgttccggatgttctcagattacgggcagcattattgggctggtatgatagctcctctactgcatccaataccatcttcctggtcttgtctgtaaccccctctttcccattaatggccaaggatgctgttgatatggaaacacctgctagtctagctacatctttgattgtagctctcttttccattcattttcctcctagttgcataaaaacgtttcgataattcgattatagcacaatttttcagcttgtcaacgactaatactatacattttatacagttatcaatcttgttttatttatttatccatgttaaaatcaataatcatacattgaataaggagaaataaactgtgataaataccgaaaaatcgaaacgtttagatggacagttatattataatcaggaccctctattactggaagaacacctgaatgtccagatgctgcttcatcaatataatcatttgcctccgaacaaacgtaagaaacgtcggaaactcctaaagcaaatcctaaaccatccaccaaaggatgcctgtattgaacagccgtttcattgtgactttggctacaacatccatattggcagccatttttattctaattataatctgaccatactggactgtaataaagttaccattggacaccactgcctgattggccccaacgtcagcatcattactgtgaatcatccccaggacagaaagctccgttccagggatttggaatatgccacacccgtgaccattggcaacgatgtgtggattggatgcggtgccatcatcaaccctggcgtttctatcggagataatgtcatcataggttcaggcagtattgtaaccaaagatatcccgtccaattccctggcggtagggaatcccgccagggtcatccgtacactggactaaaagtcagtaaacaccagcactgtcctgttccctgaaccgcaccggcgccacctccggcgtcagcggctccatcctgtattccggcaactggtcaatgagaccatccagacaaagagatgtgctgtggaccatgtcgtgggccagaaggactacctgctgccttcccataatggttttcatggcattgtcaatcagctcctggggccgggactttttcagcgcgtcgtccagactggcattccagtcaaaatagacaaatccccgtgcgtccatctcggctatgatttccttgtaaaccttccggttatagccattgatgctgcctccgggaaaccggtaaagaacaggctttaccccggtcacttccagaacagccctgtaagcttcctcaaaatccgccagatagctgtccctgctttcgtagagttccttgtagtcatggcggttgcagtggataccaatggtgtgtccctctgccgcgattctttttgcaacgtcggggtgtttcctgacattttctcccaccacgaagaaggtagctcttatattcctggctttcagcacatccagcaccgcactggtattttcagcagaaggaccgtcgtcaaaggtgagatacatggttttgggattaaaatacagatcaatgcctttggcaatgccccctgccagtttttcctggtactgcgggtctgtcagccgttctctttcacggggattagacagaaaccccgtctcgatcagacatgatggaacaaaggtctgtccggtgaccgtaaattctgcatcccctctcagttcgcgggccactgcccctgtacttctgactgcttccttgtggaccagcgcggctaaacgcccgctgtccgaagccccgtcctttccggaataccaggtctctattccccttgccgccgcgtcctcccatgtattttgatgaatgctgacataagcgccggcccggaccttgtgtgctgcctccacccgttcttcctttgaacggtatgcgtcgtcctcccgcaccatcacaacagtatatcccatatcctccagtttcaccttcagccgctccgcaatggccaggttgatgtccttctccattacgccttcctggctggcgccttcatcctcaccgccatggcctgcatccaccgcaataacagggggacctgtatataaagaattctgattgccaaaagaaaggagggattccccctggccttttatggaactttgcaggacatgtgtgtcttccaatatacgggacaggatttctgtccctccccgtcctgtaaattgccgctctatcctttcccgctctgttatttcctgctttatccgtccctgctctgttcctgccattcccaattcccgtttctccggtatgaccatggccatcactgccatggtcatgcatacgcctgcggccaattctgcggcggccagaaaaaacgcccttctcctggccctgcgcctggcctgccttctgcgctctgtctgtctgccataatcatacggttttatctctattctgtccatgacgcctgtccttttcatataaaaagctcttgtgtactgcaatcagcatacacaagagcggcatcaaattatcatcatttttgcatcaaagttgcatcatctggaaattttcaggaacaattcattgattccttcataaaaaccaactgttactatggtttcttcctcctccccttggctgataacatatttttcaaagtaaggggttgcttccattaacggattctggtccccgaaggccgccggcttctctaaccccatataggaactccacgtacccacaatctgctccggatccatgtcatcccacagcctggacgacctggcatagaattcataaatccttccgttatctccatctatataggcttccatgagacggttttccttgtccgtatttttctggctgtttataaggctcagtttccagaccgccacattattcctgggctccagcacatcaatggctgaatagaggacagcgtcatactcatccttttccactggccgaacggattcaggcaggattcccagtgttttcagttcctccagcccccggttgcatgtctcataaatctgggagtccgtgatttcctggccggaaggccctctgtgattcatcacaaatgcataagccccctccagactctcatattccgcctggctgccgtttgccgccgtcaacgcctgccctgtttcaggtatcagagcctgtcctgtttcgggaaaggtctggctgctcaggctttctgacaatatgtggagcttttcagcggcgcttaatgtatagcggtatccctccccctccgtatccgctgtcatggcatgtatctcccccaacatggtcctgtccctgtatctggtcagcatctcaggaccgcagatggacagggccataatcagccccgcaaacaacaggaataacaggtttgctgccattcttctcataactggtcctccttccagaggggcagggtgaagctcatggtggttcccttccccagctcgctccttatgttcaggcgacttttgtgaagctccagtatttccgcgcacagagccagtcccagccctgccccgttgcggcttctggacctggacttgtcaaccatgtaaaatgccttggtaatcttgtggagttcctccttcggtatgcccactccgtgatcctttacttcaaaacagtatccgtccttcatcagatggccgtagacctcaatgaggccgtccgcctcggaagctttgaacgcattgtccagcaggttcatgagaacagacttaatcagattggcctccgccctcaccatgccgtcatcatagttaaaatatattttcatgcttttgttgatcacgtacatgtcatacaggtacagaaacagggattcggccgacaccatggtaaattccacctctcccctcctggtgaccatgatgtctaacaggcggaaggacatggcctccaggcgtttcccttccgtgtaaatatagttggcggacataaactgcttttcctcatccagcctgcgggagcgcagggcatccgcataaccgataatggaggtcagcggcgtcttaagctcatgggcaaatgcagccacaaagtcctccctggcctgaatctcatcttccagctgattgatgttatcctccagggcattggccatctggttaaaatccgttgtgagctgtcccagttcgtcgctgctgactttcctggccctgtggtgataatccccggaggccatgcgcttggtggccctggtcagcagacggatgggcctggtcagaaaggacgctatgagatacataacagccgtaccgcaaagcagcatggccacagtcaccctgcggtagacagagaaacccagggacctgtcccgaaacacctctgacacgtccttcatggtctccagatacagcacccggtccagggcattgacagccgtacctgtctgtatgtagtatgctccatcctgttctatgactctgtatgtcctggtatcctggcctgtccggtccaaaagcccgtctcccccgccgaatccggtgctggcatagagcacatttttctgctcatcacaaatacgcagcaggcggccggagctcctgcctcccgactccagattggatgctatctgactcaccgtggtatcctggagcacatcatacttggccggcacattgagggcagctgtctcaaatgcaaaacggagaatgctgctctcatccatggcctggtttacttcccggtccatggaggtctgaaacacgtaattgacaaaataatatccgctgaacccaaaacccagggccatgacaatcatggtccacagcaggagtttgaacgaaaatttcattgaactacctctaggcggtatcccaccttgtagactgccaccagattattttcccatcccagctttcttctcagccgctgcacatgcaggtccagggtgcggctgtccccggaatactccccttcccacaccttttcatacagggtctccctgaaaagagccacatttttattttgtatgaagagtaccagaaggccgaattccttgttggtcagttccacattcctgcctgccctggtaaccctgcgggcctccacatccacggtcacgtcgccggctgtcagcagacgctccgtcttattgtatctgcggagaacagcctccactctggccaccagttccaccacgtcaaagggtttcaccagatagtcgtccgcgcccaggcgcagtccctttaccctgtcctttacctcatgtctggccgttataaaaatcaccggtatatccatggggcggatgtagctcatgatatcgtagccatccactcccggcagcatgatatcaagcagtatcaggtcaaaaaactggttctctatgagccggagggcctccgccccgtcctggacagacgtacaatggtaaccgctggccgacaggtttaaatcaatcaaatcacaaattggtttttcatcatctactatcagtacttttatcatggttctgtcctccacccccaatatgcgcgggccctgtccgtcaagcctgccagggtatcgccttcctctaatataagtgtttgtttcatgtccgtatcttcaaaaaatccgccggtccgctgatagtaaatggcgtagcttccctccacgaccgtcccgccgtcacttccctcatagctgtaatccgccagtatgacaatgtctttgagtccgtccccgtctatatcctggcaggtaacgccctttaacgcatagagatgttcatattctcccatgggctggaagctccagacaatatagccctgttcatttaccaggtacagcatgaataccgtgtactccgccatccggtaggtgcccgggacaaccaaaaggcggccgaacttctcaaaccggatagaacggctctgctccgaaatgaccgtcatcccgtgggacaaaagctcatcctgggcagtggccgtatacagaaactcggtagagtatccgtcccggacaaaagatgtgatgaaacggatgctcttattcatgccaaaacggttcatcttttcggagagtctgtaatccctgtaaaaaccgtcatttttctgaaacagcacatcccccaccttgtatggctttccctgtttaccggcgccctcattggcacaggcggttatgagcacgatatcctgccatccgtccccgtccatatcctgaaaggacacggcggccacccggctgtcgggctgcctgagctgacctcttatccggttattggtctccagctggtctgtcttatatgccatggtcccgtccgccctggcaaaaaacagcaccagccggttggactccctgtcaaaggccggtataaaggacacctccccctctcccttcatggtcatggggaatatctggctgtccaccgccttaaacccttccctttcaatatccccggtctgaccgaccgcgttaaggcgctgcctgtattcactgtatgaacgggaaacagcctgggaatccggagcaccgttggatgccccaggaaagcccaggcataagacagctgttgtgatcaggaacaggatggtccggaacgaaaaggcagaatatgtttgattcatcaatggcatgcaccagcttttcttaatgtactattccgattatatcaaataaagatgggaattcaaacatattcatggcctgtgccaaacaaaatatttgaggggatgccgccggtactcaaaagctgcccgaaaaaagaaacttaaggattgttcaccgcgggacgattacacacccctatatacagcggcgctcccatatatccggtgaccgcatataaaaagggcctgtccaggttcatctgcaaaactggctcacctgaatacaatccagcaaatccggcttctccgttctctgaaaatggacccacaccgttttcattgacgctgaatacggtggattggatcacgccggaaagtgaaaggctttcgcctgtaatacctgtaaaatcagcccggctgacatcaaatacaccagtcagccccagaccggccagcgaaggacccaggtccgccgtggtggcggtctggaatttaggaatcttccagtaaattccgccgtaggattcaagctcatcaatcctgccaaacatttccctggtatactgttctgaggagagcagttcccggattgtcacgccctggtcaggcagaacaactatcatggacgcgttatccgtaagggagagtgatgcgcgcaggaatccctggccccggtaataagtgccgttccaatgtcctgtcatatactgacaggttatatcctgtccatcggcagaatggaacacatctgttatattgtcctcagtcctgaaacctcctgtccactgggcctggtaattcactgcattcacaagtttcatgctttcaccggaagcggttgccacgtccatggaaatagcctgatccgtctgccagccaatccactgtctgataatggccggcaggtccggatttccaaagtccacccggaaaacagacgcatagtactcgttttccgatgttctcttaaatgagtcgttcagcggggccccttccttcagccacatggaatttaccagcttcaattttgtcttttcattgttcctgaatatctgccggtacagacgtccgcaggaagccgccaggccggccggaggctgtgccgtgtgcaaagcctgggccggttccggagactgagacccgtcaggtgtctgactgccgattcccataagcgccagcatctgggccctggtgtttccctctgcgccctcggatgcctgggccagggcatagtacaggctcaccggcgaaaaattcatattttcccggctgtccctcaaaagcggcaggaacaccctataggaaaaccgggatattccatctgtaaactccggattcaccgtgttgttctgggctatagcgcgcatgctgcctgaatcattgtacggtatgggatccgggtccctggaaccggattcacattgataaccttctcctgatacaccgttaaaaggcgcggcaaaggccgcaggacttcctgcggccagtacggatatggccgtggccagaacgcctgcggcggcaatggatattatattgcgtttcatgattcattccccctgtaatgactgaaaaaccaaaaccatttgcttctgattttattttaccagaatatcatcaggaagatgtttctattttcttaattaatgcggtcgttatctgttaccaaagggagaattccttatctcccaccacagggtccgcggttcccttcttcttgtctatctcatatgtattgatccggtggaacacatccggcttatcctcatatccaactgaaacctggaccatttgattgttctcataatccgccttaaactgcaggggttcttcttcgtcctggtacattcccatctccagaagcttattttccagaaggcggcaggctgcctccgatgtcatggacggcttctcaatccatacgcctgtctctgtatccaggcaataccagattccgtcaatccggttccagccttttaggagctcctgattttcttcgtagacccactgtccgctctcctcctgtatccattcccctgcccaggccggaaatgtacagcccagtatggataccatgaccgcaaccccagccaatctgtgtcttattttcattcgatcccgcctcctgttccagcgcaagtcttaaaaatatttttaaccatacaccagtatacctcataaacattaactttatataaactggtccgggattccttaactgtcacaacacctctttcttttgtcctgcttccttaacccgcttcctcaaaattccctgtatacagctgatagtattttcccttccttccaatcagctcctcatgggacccccgctcgatgattcttccctgttccatgaccataatacagtctgcattgcggatagtagacagtctgtgggcaatgacgaaggtggtcctcccattcatcagggcatccatgccggcctgcaccagggattccgtcctggtatctatggatgaggtggcctcgtcgagaatcagtacaggcgggtctgccacggctgccctggctatggctaaaagctgcctctgtccctggctcagactgcctccatcccctgtaaggacggtttcatagccatgagggagacggtttatgaagctgtctgcgttggccagttttgctgcattgacgcattcctcatctgtagcgtccagctttccgtatcggatattgtccatgacagtacctgtaaagaggtgggtgtcctggagcacgatgcccagggagcggcggagggccggtttcttaattttattgatattgattccgtcatatcggatttttccgtcctgtatgtcatagaagcggttaatcaggttggtgatggtggtcttgcccgccccggtagatcctacaaatgcaattttctgaccgggttcggcaaacagcttgatgtcatggagcaccatcttggatgggtcatagccgaaatccactccgtcaaaaacaatgccgccttccattttcttataggtaacagtcccctctgccttatgggggtgtttccaggcccagacaccggtgcgctcttttgtctcttccagtgtgccgtccttccgttcccggacattcacaaattccacatacccattgtcctcctcctgcttctggtccagaagctcaaatacccttccggcgcctgccgctgccatgaccacagagttcatctgctggctgatttgggtaatcggctgggagaaatttttattgagtcccacgaaggcaatgatggtgccgattgtaattccacctatgccgtttaatgccaggattcctcctgccactgcgcacagaacataactcagattgccgatattggcattgaccggcatgaggaggttggcgtaccggttagccttatcagcgttgtcccgaagcctttcattcagcacctcaaactcctttttggcctgttcctcatgacaaaataccttgaccaccttctgtccgtccatcatttcctctatatatccgtccacctctcccagggagttctgctgttttccaaaatgggcggcagatttgcctgaaagacattttgtggcaaacagcatgacacaggccatagcaaaggtaagtatggacagaggtatatttaaaatcagcatggaaacagcggttgccaccagtgtgaccgcagaattggctacctggggaacactctggctcatgagctgccgcagggtatccacatcattggtatatactgacatgatatcgccatgggcgtgggtatcaaaatatctgatgggcagagattccatcctggtaaacagttccaccctcagccgcttcatggtgccctggcttactgtgaccatgattctgttatacgcataggccgccagaatgcctattaggtaaaggactgccatcctgcacagcgcccctgccaggggagaaaaatccggcgctgtattccccgttgacgcctgttgggccaacggccggatatagtcatccaccagggattgtatgaacaccatccccttcagggtagccccggcggacactatgatacaggccagcaccgcggtcaccgcaagtttataattggcagccatataccggatgacgcggcccaggatcctgatggcttcctttgtctccctggcctgctcctgtctgccggtttgttctttccggctgctctgcgcctgtccgctgttctgttttttcaggctgctctgtctgtcttccatcatgccacactctcctttcctgcgttttctgcctgaacctggtcaaagtcccctccgcccctgctctgtgactcgtatatttcacggtatatctcattggacctcatcagctggtcatgggttccgtatccgtttatacgcccgtcctctatcaccagtatgtggtccgcatgctgcacactggatatgcgctgggcaatgatgattttggtggttcccggtattgccgccccaaaggcttccctgattctggcatctgtcgccgtatccaccgcgctggtggaatcgtccagtatcaggatcctggggttctttaacagcgccctggcaatacacagcctctgcttctgaccgcctgacacattggttcctccccgctccaggaaggtatggtatccgtggggtagacgctctatgaattcgtcggcacaggccgcccggcaggcttcccggcattcttcttctgtggcatcctgatttccccaccgcagattctccagaatcgtaccggaaaacagtacatttttctgcagaaccactgccacggagtccctgagcgtttccaaatcatattcccgcacatccctgcctcctacacatacgctgccgctgtccgcgtcatagaggcggctgattagatttaccaggctggacttgccgcttcccgtgcctcctatgatgcccacagtttcaccggaccggatatgcagctcaatatcggacagcgcctgcccgcctctgcctttgtccatccccttatacgttctcccagcgtcctccttacccttcccataggaaaaacatacacagttaaaatcaacgcttccgtctgccacatccatgacaggccgttccgggttgcggatatccggctcttccttaaatacctcctcaattctccttatgctggcagcactcatggcaatcatgacaaatatcatggacagcatcataagagacatcatgattgacatgatatagctgaacagggaggtcaactcgccgctgctcatagttccaatgacgataaacctggctccaaaccaggatacggccagtatacagccgtaaaccaccagcatcatggctggattgttaaatgccagggtgccttctgcctttacgaacaggcggcagaggttttctgctgcactggtgaatttctggttctcataatcctcccgcacataggccttcaccacccggatgccggaaacattttcctggacccctgcattcaggtcgtcatattttgtgaaaacaacgttgaatatcttcctggccgccatcatgatgattcccagtatacatgccaaaaacagaatggctcccaggaaaatcatgctgagccgggggctaatcatgaaggacatgaccatgctgcataccagcatgaggggcgccctgacagccacccggatgcacatttgatatgcgttctggatattggttacatccgtggtcatacgggtcaccagacctgccgtgctgaacttatcaatgtttgaaaaggaaaagtcctgcaccttgtcatagattccctttctcagattacaggccagaccggaggatgcgctggccgcgtactttcctgccatagccccggatatcaggctgataaaagccatgacaatcatgactcctccataggtatatacctttctcatgttcccttcctggattccctcatcaataatcagcgctgtgataaaaggaagcatgacctccatacttacctccagggcggtaaagagaggggtcagaatggaatcttttttatattgcttaagctgtgctaaaatcgttctcatattctgtctccttatatagtgtctccttattttttaggtattgcaactgactgtgccattagccggtaacggttctgaacacgcacaaaatagttaactagctaataattagctccctatatttatacctcatatcctgttgaatgtgaaattcaaatatgttataatctataaaaatattttattgtttactattagtattgtttttagagtcaatcgaacaaaag

SEQ ID NO: 3165 - DNA, 75072 bp, Unknown
  gut microbiota DNA sequence
tgaggtgggctggcaccatgatagtaatggctggtggtatgcatacagcaccacagagtattacaaggagtgttggcagattataaaccatcataagtattatttcaatcctgacggatacgcactcactaattggcatgtaattgatggcaaggattactattttgagccacgggctgggcatccgttggaatgcgctatgtatgtagcgccagatggggagcagtacataggtgagttttgagttgaaaaaggaccatcgaattgcattggtggtccggatatgttataattaattttgaatcgggggagcggtggcaagcccgccctcccttggttcattcccttaagcctattcagtaggcttattttttttgctgtggtttgtattgttcctcgccagtctcgatgtaaagaataaaatcgtttatgtccttttcatcccacccggcagggaaggaatacgggacggataaggatacatgagattataaatatggaagaaataaatttgcaagtttacaaactctatacacatggttaaagcctgtttgccgcaggcatggcagctcttaaatggtttatccaggttataggcaatcctgggcagataacccgagtcctccaacagggtaaacagaggaaagaagatagccatgggcggcagcattaccgagacaacccaggccaggacccggtagactcccaatatcagcagcccgtgaagccattggggggcgcccgcggccatgaaggctttggtgagctgatcctggaggcggaacagggcgtccgccagcatctgggaggggtaattggcgcctgtgatggtgagccagaataccacggccagcattcctatcatgacgggatagcctgtaaaccggctggtgagaatcttatccagcttacggtccccctcattgtagccgtttttgtggaactggaccgtatcacggcatattttttctgccgatgccaccagggcagccacgatgcggtcctttagaatttcattggtaatgccgtacttggccagatgctccctggcctgtgacagggcaaggcttatctcaggcacttccagtatatcctcattcagatattcccttaattctttcataagggacgggtcgctgtccagaagctttaaggtgagccagcgtgagctgacctttccctccaccctggcctttacggcaggctctgccatggcgatggcctgttcaataatgggggagtactccacctggtagggagaggcggtttgtgtaccttccaccaggtcatccagctgtttcatcagctggtcaaggcttcgctttttcctggcaatggtgccggccaccggtacgcccagcttttccgacagccccttcaggtcaatggtgatattcttgcgggcggcttcgtccatcaggttcacacataccaggacccggtccgatatttccatggtctgaagtaccaggttcaggttgcgctccaggcaggtggcgtcgcacacaaccacaaccccgtcgcttccgccaaaacagataaagttgcgggccacttcctcctccgcggagtgggccatgagggaataggtgccggggatatctaccagcacgtagctgtgctcctttgttttacagtagccctgggcattggtcacggtttttccaggccagtttccggtatgctggttcattcccgtgagattgttgaaaagggtgcttttacctacattggggttgcctgctatggcgattattttatcatcaggtgtctgtttttttatctccagtccggaatccacagctcccattccgacggattgtttggtcagacccattttaatactcctttttctttttttattaggcaattccatatctgacctgagtcagatgatgtttcttacgacagctgtttttggggagataattcacaggctggtgcagccctccattacctcctgctcgctgaaaccagtgcagggctgaaccagtatcccgcggcagtcctctgagcgtatggcgatgacagcaccgcgaatcaggtaggcgcaggggtctcccagagggctttgcccaaggcactccacctccgtattttcaaccaggccgatatccagaagacgcctgcgtatgctgcctgtggaagtaagctcttttacacgtgcccggtttccgggttttatatcattcaaacatagaaattctttcataattacaatacctcgcaatagatttaggatagggaaactttttcttactcatatagtattacaggagggacactttggttactgataaagatggattctataccatgaaaggatatgaacgctctgcttccgatgagatgacttcatccatggaggattatctggagatggtgtgcagaatggaggaagagggggaacccatccgtgtcagttccctggctgccagccttcacgtacggccctcatccgcctcaaaaatgttggataatctgaggaaagccggatatattgatttcaagaaatacggctccatcatggtcacggataagggatatgaggagggtaggtatctgctgcacagacaccgggtgctccaggattttttctgtaccctcaaccatacggaggatgaactggagctggtggaaaagattgaacattttatcaatcacaggaccgtggaaaatatggagcaggctctttctttcctccggcataagaatgatatgactggaaaaatgggataaagtattgtataatgtgtaatatgcaaaatgataaaggagagacattatgaacgatgataactatgtagagtggcttgtgaagagaaaagatccggcatatgccgttcctgtaaaaatactcatgattgtggtctgtatattttccgtcctttcagcgctgcagactgtgtttggagtaattgttatgaccatagcaggtgtggctacctattttgtgttcctgaacctgagtgtggagtttgaatatctgtttgcagagggcggtctgtcggtggaccgtatcctgggaaaggcaaagagaaagaagatatttgactgtgagaaggatgacatccagattgtggcgccggcagattcctttgtgcttaaggattatgagaagcagggcataaagataaaggatttttcgtccggcaggaaggatgccaaggtgtacgcccttatataccagaagggtccggaccattttaaggtactgattgaaccaaatgagagaatgataggagccatgcgcagaacctttccgcgaaagcttgtgatgtagggcaatgggcatatagggcaggtcgggagagaacgggccgccggggacagcggaataacagctgtcccggcggcctgtctttttattttgctctatttcaggttttcaccgcttaacatgaattctatcagccggtccatgtcctctttttcatgaaccactaattccaattccttaatatatccgttggaacacatattggcaatggaaagatactgggatagctttgactttaggttaatcctgtcgccctccggagataccagttcgatttttcctttacactggtccactgcttcaaaaaaagcttttacatctgagatgttttccagtttcatacaaaacccctccgcttctgttggtgtgcactgcattgtgtgaattatggtggtatcaggcactctaatcactgttatggatacaatacagcgctggtttatagattataaccagtatatcaatgggggaaatcggtctggtgggggactggtatgagatacttccacggctgcttaagacggttaaggagggtacgtgatggggtacaggaaactggatgagagggatatcgcttatttgaaaaaggtgacagaggacggacgggtcctgaccggatccgatataagccaggattacagccacgatgagctggggggagtggagcgcgctcccgaagcccttgtaagggtattgtccaccggagaggtttcggacatcatggcctatgccagtcgggagggaattcccgtggttaccagaggctccggcacagggctggtgggggcggctgtcgctatccacggaggcattatgctggagaccacacagatgaaccatattctggagctggaccgcaggaaccttactgtgacagtggaaccgggggtgcttttaatggatctggcgcagtacgtggaggaaaacgggcttttttatcctccggatccaggtgagaaatcagcgaccataggcggaaatatcagcaccaatgcaggcggaatgcgggccgtaaaatatggcgtcacaagggattacgtgagggcgctgacagtggtgctgcccacaggcgaggtggtggaatttggcggtaagacggttaagaacagttccggatacagtctgttaaatctgatgattggatctgagggaacacttggggtcatcacccgggccgtgcttaaattggttccccttcctgggaagacagtgagccttctggttccatttgcagatatggagcaggccatagagatggtgccggtgattgtggaagcgcagatacaggccacggccattgagtttatggagcgggagaccatcctgtttgcggaggaatatctgggcaaacggttcccggataccaggaatgacgcctatatcctgctcacatttgacggaagaaatgcagagcaggtgcgggcggagtaccaggaggtggcggacctgtgcctggaacacggggctttggacgtgttcatcgtggatacacaggagaggaaacagagcgtgtggaacgccagaggggcatttttagaagcaatcaaggcgtccaccacccagatggatgagtgtgatgtggtggtgcctagggaccgggtggcggattttatcaaatacacccatgaggtggccgggatactgaatctgcggattcccagctttggccacgcaggcgacggaaaccttcatgtgtatctttgccgggatgacctggcagaggatgagtggaaagaaaaactgagtctgggctttgagatgatgtacgcaagggcgcgggaatatggaggggcagtatcaggggaacacggcatagggtatgccaagaaggaatatctgaaagaacagctgggggacacgcagattggcctgatgaggcggattaaaaaggcctttgatcccaatctgatcctgaacccggataaggttgtctgatatggagctggcagtactaacctgctggcagacagccgcagggggatattagaatggctgatggaaccctattagtaaaatcaatgaatatttctctctgttttggtttgacaagccagataaaatttgctagtataagatactaataagaaacggacagttcacggactatcaatattctgacaaaacatatcaaatcatacacgcagaaagagaggaaatttataatgggtacaattatcggcgaaggcataacctttgatgatgtacttctggtaccggcattttcagaagtgattcccaaccaggtagacctgaccacacatttgacaaagaagattaaactgaacatcccgcttatgagcgccggcatggatacggtaacagagcaccgcatggccatcgccatggccaggcagggaggtatcggtatcattcataagaatatgtccattgaagcccaggccgaggaagtggaccgggttaagcgttctgaaaacggtgttatcacagacccatttttcctttcaccggagcacactcttaaggatgccaacgatctgatggcaaaattccgcatatccggcgttcccatcacagagggcaggaagctggtgggcattattaccaaccgtgatttaaagtttgaggaggattttgaccgtcccatcaaggagtgcatgaccacaaagaacctggttacagccagggagggcgtaaccttaaaggaagcaaaggccattttagcaaaggcaagagtggagaagctgccgattgtggacgatgatttcaatttgaaaggccttatcaccatcaaggacattgagaagcagattaagtatccgttgtccgcaaaggacgcacagggacgtctgctgtgcggcgctgccgttggcatcactgccaatgtgctggaacgtgtaggagcattggtggacgcaaaggtggacgtggtggttctggactccgcccatggccattcagccaatgtaatccgctgcgtgaagatgattaaggaagcatatccggaccttcaggtggtggctggaaatgttgccacggcagaggccaccagagcgctgattgaggctggggccgattccgtcaaggtaggcataggacctggttccatctgtaccacccgcgtggtggcaggcattggcgtgccccaggttacggcggtgatgaactgctacagcgttgccaaggagtacggcgtacccattatcgcggacggaggaatcaagtattccggcgatgtgacaaaggccattgcggcaggcggcagcgtgtgtatgatgggaagcatcttcgcgggatgtgacgaaagcccgggcacctttgagctgtaccagggacgtaagtataaggtataccgcggcatgggttccattgctgccatggaaaacggaagcaaggaccgctatttccagacagatgcaaagaagctggtgcccgaaggtgtggaaggacgcgtggcttataagggaatggtggaggataccgtgttccagctcttaggcggcctgcgctccggtatgggatactgcggcgcccaggacatcacaactcttcaggagacagcccagtttgtaaagatttccgctgcgtccttaaaggagagccatcctcatgatatccatattaccaaggaggctcccaactattcaattgaagaatagggatgcgggcataatgattgaagcataagaagaattggtttataatgatacccgtcggagctgctccgacgggtatttcagatcgcccgccatgggcgggttttaacgggaggacaggcatatggaacaaaaaagcaggctgacaacgctgtgctatatagaaaatgagggggcatatctgatgctccacagaatcagcaaaaagaatgacgtgaataaggataagtggattggagtgggcgggcattttgaaggggacgagagcccggaggactgcctgctcagggaagtgagagaggaaacaggacttactctcacatcctggcggttcagggggctggtcacattcatcgcggagggctgggatacagagtacatgtgtctgtatactgcggacaaatatgagggggaaatgattccctgcaacgagggtacgctggagtgggtaaagaaggaggacgtgctgtccctgaatctgtgggaaggggataaaatcttttttaagctgttaaatgaggatgcccccttcttttcactgaaactggcttaccagggagaccggctgagtgaggctgttctgaacggaaagcagttggaattgttcgatgtactggatgcggacggaaagaagactggagtggtccgggagcggagcctggtccacatggacggggttccccacaggactgcccatatatgggttgtgaggaaaaataaggataaaacatacgatcttctgctgcagaagcggagcaggggaaaggattcctatcctggctgttatgacatttcctcggcaggccatgtgcaggccggtgatgaattcctgccgtccgccatccgtgaactgaaggaggagctgggaattgaggccggggaggaggatctggaatttgccgggtatcacaagggatatatggaagaagtgttttacgggaggatgttcagggacagtgaagtcagtgctgtgtatgtgtacagcaaaccagtggatgcagaccgtcttacccttcagaaagaagaggtggagagcgtcatgtggatggggcttggccagtgtgtggaggcggtgagaaaccacgggattccaaattgtatatatctggatgagctggagatgattgaggggtatttgtgccggagccaggagaaatagcagataacaggatacagggagtgtggatggacatcgggcatacagcccagggggcttttattttcacctaaaccatcgtataatgaaaaaaacgacaaaggaggtaagtgcatatgcggtgtccaaaatgttcaggccagatggagataaaccgaatcagaacacaccttgtatgggtggatgaactggaccgtattcccgattctaaaaaccagctggggccaacaatcgcttatgtatgcacggaatgcggatacatagaattttatagagatctgacatccgtgaattaaggtgttcctgcaccatgttccggaacggatatgaaacacattccggcaggaaggcaggataaggcatagtaaaacaatggaatgaaggcatggggaaccactgtataatggaatgcggggggatggaaagaaaaaaatctgcctgtgcaattaaagaaaaaatatatatatcgtaagtttatcgtcagaaatagatgttttttgtaaccatgaagtatggtataatatctctagttttgttcagaatgacctgctgtatgggagagatattatgagacttaagaaatggaaatcatttttatgtatatgcaccagctgtaccctgttgatgagtacggcagcttcagctaatccggctgccatcacgcctttggaagaaagccaggtatcttccttccagtccgggaaccagacctctgaccaggggatggtatcgtcccaaggaccgggttcggaatccggaagtgacggagcggtcatttcatctgacgggccatcctcatcaggaagtccgtccccgtcaggaagcccgtccacctcagggagcccgtccacctcagggagcccgtccccgtcaggaagcccgtccacctcagggagtccttccacgtcaggaaccccctccccgtcagaaagcccctctttatcgggaagtccgtcgcagaatccgtcagccggccaggctgcagggacctttgaccagacggccgcagcttccgtgcagaagccggagatagcttcggagggagccgtgctcatggatgctgccacgggaaccgtcctgttttccaagaacggggacaaacagttctatccggcaagtatcaccaagctgatgacagccctgctggtggcggagaactgcagtctggatgacaaggtaacattttcagcaacagctaccacgaacctggaagcgggcgctgtatccatcaatatgacggcaggggatgtgatgagtgtgcgccagtgtctttatgccctgcttctcaaatcagccaatgaagtgggaaatgcccttgcggaacatgtggctggcagcaatgccaaatttgcggagatgatgaacgccaaggcagcggccctggggtgtaccaatacacattttacaaatcctcacggcctcaatgactccaatcattacaccacaccccatgatatggctctgattgcaagggcggcgtttcagaatgatgtggtgaagacggtggcgtccacgcgcacgtatacgctgcctgctaccataaagaatccttccgggcttaccgtgaccattggacacaagatgctgaaccccaacgatgccaggtattatccgggcgttatcggaggaaagaccggttatacgtccaaagcgggaaataccctggtgacagcagtggagaaggacggagtcagattgattgccgtcattatgaaaagcaaatcgactcattatacggatacgaaggcattgttcgattacggatatgaactggtgaaggcaggtgctttaagcggcagcgctggcagtacaggcagttcagataacgcaggcacgacaggcagttcttccggcatgggaaatgccggtccgggaacatcctcagccaagggctgggtacaggacagcaatggatggtactatgtgaaggataacggggccaaggctgccaatgagtgggttacggcagacggtgtttcctactggattgattccaatacatatatggccaagggatggcgccaggtaaacggcaaatggtatttcctgcgctccaacggagccatggccaggaaccagtgggaaaaggtggaagaaaacggccagtggttttatctgggcgcggacggcgccatgctgaccaacacaaccacgccggatggctcgcgggtggatgagagcggggcatgggtgcagtaacatcagtatagaaaagatgctgcgtgtattgtattataaagcgaatctcctaaaagctgcggcttttgggagattctttttgctttttggagagcctggttttggaatagataccccgggctaacggctggtgcttacgtttttgccggccaattgaaaaaaagctgttgcatttgacagaagcgcaccctgatattacaatcaaagaaacatatgcttatcgccattggcgcaaaagaaccgggctgataatcatggcttcagaaaaggggatagagggaggtttaccatgtatgaaagaatgcttgacaagcagaataaaccggcatttgatgatatggccgcgtactgcggcaaaggtatggagttgtttatccgaatcaatgagtggttgtcagatacatgcagcactgtgcaggagattacttttccctatgggaataaatatggctgggcagttgcccatagaaagaagaaaaagctgatttgcaatgtgtttgcggagaatggcgcctttaccgttatgattcggttgtcaaacgcacaatttcatttggtatatgaccaggttgagaaagaaactcaggaatgtatcgacaacaaatacccttgtggtgacggcggatggatccactaccgcgttgccggtgaagctcatttctgtgatatacaaaaattgctggaaatgaaatgtttatcatgaaccatgagagcttccagctgctaaagttaatcttaatattcgtaagatgtaagaaataagaaataaatacaggcagcagccctgttatgataaaaacagataaatatatgtggattttattggagagaggaggactcgccatgaagagaagcacaatatctattcttatgacagcaggtctgctggctgttttgctgtccggctgccggttgggaggaggaacggagggagaggcagcgggctctggaacgaaagagaatgtttccaagccagcggccggtacggcccaggaaccggtgccggaatcaaaggtgaatcaggaaacggaggaggacgcgcaagggaagcaggaaacgcaagggcagcaggaaccgggagtgaaccaggtgcccaaatcccaggggcaggtctctggtctgccgtatcagtttgcctcaaaatatggaatcattcaatcggaatatccggtatacgaattggatgctgtagttgaatccaagctgccccaaaaggaaaagaccatatccctgacatctgccctccaccagaagcaggagctgcttgtgagtatggttttggatgactatggggaagtacagaaaatcccggcaggcggagaacctcccgcagacagccggtattttacgctaagtgacgggaccatgattgtttcggagaaatatcaggacgaactttggaaatcaggcgaaggcctgttcctcacaggtcccggcattccggaaggcggaattaaacctgtggaatcggtgtatgctgactattcggcttattttgaggaatatgggaacatccgttatatcatagaggcaagatttgagctcccatcagctcctgtctgcgaagagcttttgtcaggctatgcgatccggctttttgattttgaaaagcctgtggaatttgccctgaaaagtgtgcctgaatatgggacgctggaggaactggcaaaagaggagaatggaagcatagatacccatgacggtatatccattataagtatgggggaaaaggtaaaggagggaatcctgatatcctggtatgtgtacagtgatgagggaaggccgtccataattattggttacaaaacgccgtccctggatacggacacaccgcccctggatatgccaaccatatccggcagcggcagacagtatgaaataaaggagttgtctgccaatccttattgggacaatatgggacattaccggctgtcggatataaagcaatacggacggcgcctcagatgcctgttcgatgttccccaggaggaacagaatgggtctttccggattcatattccgggaatcacgtttttgaacagtgaggaatctgagccagtcaccctgcctgtcccggaggactataaagaattagaggaaaccattccgtggaaagacggttctgtgcgtattcttggtattaccaggatgaagccccagacaatagaatcagaggacggacagggaaatgccaaagtgacagagagacccgctgtgtacatcgacgtggaggcagtgcatgaagagagggagctggcgttaaagggactgctctgccagagaaagttaagatggggaagatgggaacgtgaacggtatgattttgatgagaagggcgttctgagcggtttccggattttttatgaggaaggcgatacggaagtaacactgaaattccagggagctgcgttttactggatccagccgtatgtgatggagataggggcagacaaaatagcataaggcaggtttatacctgcccccacacaggccccagcaagtcagactcagtctgacttgtttttcttcccctgccgttgtagaataacctcagaagaaaaatcatccgggaaaaatcccccgcagaaaagtgagaaacgattcatgaaatccatacgaaaagaaatgacaaggaaccatgtgattctgctgctggtggcctttatcttcatagcatccaacgcccttgtgaatgtgggatcctcccgccgctacaacgggcttttacaggattaccagcaggtaaacgggctgctggctatcaataacaggagacagacctactttaagctgtacagcaagagccacgacgaggggatgcttaagcagtactacgacgagtgcgagctgtttgacagccagctgcggggactggatgagaagatgcgaaatgaccggaagtgcaagatgatgtaccggattgtggggcaggtggctgagcacaggcgggagatggcagagtcctacatccggcctgacggggactactatcccagcctgatggctgatttggacgaggtggatttggagattgagcggtgcctgaaccagttgatgagccagtacctggagtacctgaacactgcctttgccagccacagcagaaccctgggacttacaaacagcatcctgatcgtgtttttcatggcagccagcctttttggcatggtgctgaaccatcagatgagcaccagtatcctgaattccatcaaacggctgacggacgctgccagggaaattatgaacaataacctggaggcagcggatatcgaggagacgccttatgcggagctgaaccaggtatccgccacatttgaccagatgaagcggcaaatcagaaccatgattacggaattgcatgagacacaccagatgaaggaacggctggctgaggcgaagatccgggagctgcagatgcagatgaatccccatttcctgtttaacaccctgagcctggtaatccgcagtatccagctgggagagcgggatacctccattcagctggtcaaggccatctccaaaatactgcggagcagcattgaaatcaacacggtatccattccgctggatgctgagattgagctgcttcagtcatatctgtatatacagaagctgcatttaaagggaagggtgaccttctgtctggatgtacgcaagtcatttatggacgaggatgtgatgattcctccgctgacaatccagcctctggtggagaacagtatccagcacgggctgaaggaccgggtgaacggggggaaggtggatatactgattaccgagaagccggattatattgaggctgtggtggcggacaacggtgtgggttttccggaggatccgagccagccggcccgcagggatacgcctatccccaaaacttccatcggcctgaaaaatgtggaggaacggttaaggctgttttaccggaaggaggatgtgctgcatatccagcggacggagggaattacgaagattacgctgaagctttataaatcagacaggcattaggaggaaagggttatgttgcgtgtaattttggcagatgacgagcagtatgagcggaattatctggagaaggttataaaggagagttatcccggcttgctggagattgtctacaaggcagtggacggtatggatttgatggagaagctggaggaatgcaagccccagattgtgcttttagacatcaagatgccccggatgaacgggcttaagacagcagaggaggtgcgcaaaaggcatccggatatccagattgtgctgatatccgcttacagtgatttctcctttgccaaacaggcaatcaagctgggggtgacggattatctgctgaaaccctatttggactcggagcttcgggagacactggataaggtcattgccagggtaagggaacgggaggataccttgtccatgctgtcctattccaattacctggtggaggatggaaagtcagcctttgatttttaccgggatctggaaaaggatttgctgtgggatgtgttctttggccgcagggacagggataaactggaaaaagagtttgccatgtggggagtgggaccggggtggtttaaggtagtgcttatttccagtccggccctgattagcatgggaggattttcccaggaggtgctgaaaaattattttcacatggcaggggtgacggtgcttaacagcatctggatggaccagatggtgatctgcctctattctcagcagcaggatgggtttacggagctgaccggctgcattacccgcgcaagggattacctggcagaggagaggaaaatcccggtggcctgcggtgtcagcggcgcttatgaaggcatggaacggctgacggaagcctatggggaggcggcttcctttatcagggagtattccgcgcaggaggctcgccttgcctttgacagcatgacggagggcatgaaacggatctgcggcctggaggaacagatcatcaaatccctgtccctggaggaccaggacctgagctgcgagcttcttacggagatgattgaggagctggagacccttttagggtatcaggatgtttcggtaaaactgaattttggccgcagcctgatgacaattatccggggaatcaaccagataccaggtatacgggtcaagacctcagaggcagccaggcgttttgaaaagctgggccagcttaattttaacggggataatttaaagtatcatgtagagtttttttcggaaatgaagattcagagggaatgatgttcaggcggtaatgtttgtgcaaattcggaaaatgaccggtccgggacaggaggaacgtgttgaaaaaacagtggttgataggggctgcggccgcagcgctgattgcaggcctggcgggcggctacggtattttagaaaataggggggctgcgggtgcggacaatgaaccggagattgtgctctgttacggcgaggtgaatccggaaggccatgtgctcacggattcggcccagtactttgccgaccgggtcagtgaactcaccggcggcaaggtcatggtggaaatctatccatccggacagctgggggacgatgcgcgctgttaccagtccatggagatgggggcgcttgatttgtaccggggcaacagcatgtccctggtggacagcgggaatcccatgatgtctgccctggtgctgccctatgttttccgggacagggagcacttctggaaggtttgcagcagtgatttgggcagggaaatactggataatatccaggactgcaccggaatgattggcctggcctatctggatgaaggagccaggaacttctttaccaccgacagaccggtgtgcaggctggaggatatgaaggggcttaaaatccgggtccaggtggcgtccatgatgggcgataccgtggaagctctgggggcggaggcagtgcccattgcttatgcggagctctatacggctctggagtcagggaccattgacggggcggagaacccgccggtgagctattattataataagttttataaggttgccccttattatgtgaaggacaggcatacctatacccccggagtgattctggtgagtaaaataacctggaaaaatctgaagaaggaatatcaggacgcgctggttcaggcggcaaaggagacccaggagtataacagaacggccattgaagaagcggatcagaaggcttatgaggcgctggagaaggagggggtaactatccttgagccggaggatccgcaggcctggagccaggcaatggagccggtataccggaaatacggcggggaatatctggacctgattgaaaaaatccggcagatacgatagacacatacacaatgacaggaggaaggccgcgatggcaacaggacttatgaaactgcccgaaaacagggtacggagaaattacacagggggtgcgggaattgaccggctccatggaaaggcccggcaggaggacaacaatatgccggaggaatgggtgggctccatggtggaagcctccaatccgggaatggaacccattgcacacgaagggatggctgtggtggagaccgcggacggccccaggtttctgcgggacataatagacgatgaccgggagttttacctgggcgccgccggcagggaggggggctggcgcctcagcttcctgcttaagattctggattcagccatgcggcttcatgtacaggcccacccttccacccagtttgccaatgaagtgatgggaatgccttatggaaagcttgaatgctactatattctccatgtgagggacggtataagcccatacatacgtctgggattccagcatacgcccggaagagatgggtggagggaaattgtggagaaacaggacaaggcccggatggacggctgctttgagaagatcccggtgcaggtgggggaggtctggtatattccgggcggaatgcctcatgccattggcgagggaatcactatgctggaaattatggagccgtctgatttggtggtgcggtgtgagttcgagcgggagggaatcgttgtgccggaggacggccggtttatgggacgggggctggacttttgcctggatatttttgattatacagagtattccaaagaagaaatcatggaaaaatgcaggatagagccccgtgtattggaggaaacagacgccttccggcgggtgcggctggtggacgggacgctgacctcctgcttctttgtggaaaaactggaggtgaacgggccggcactggtggggcataaccggaaatttaatctgggcgtggtgtgtgccggaagctgcaccatggaagagagtggacaggtgatccgccttaaggcaggagacagcttcctgattgcagccggggtaaaagcgtaccaaatacggcctgaaggcagcgtccagatggtgatggtgtatccgggaaaggatatggacaagctctaatccagattcacgttgcgtacggaattgcggataatcagggaggcttttaatatgggaagctctgcccggaccccggattccagataaccgtggataaagtcaatggcggttcctgccagtttgcggacagggatgctgaccgttgacaggggcggagtcacaaaattagccatgatacagtcatcgtagccaaatacggacaaatggtccggaatccgcagcccaaggatgtaacaggcccggtagatattgaaggcggtcatgtcgttgcaggcaaagatcgcctcagggcggtcgggcttttgaagcagctgcaggatccggccgggagtggtccccatatcctccgggttgatgtcaaagagcatgtggctggggcggcagtccagcccgtgctccttaagggcctgggccatgccgtcatagcggtcccggtaggtgaggttgtcaaagctctggaagatgccgccgatatttttatgccccagcttaatcatgtaggaaaccgcctcgtaggcggcttttttgttgtccagacggaggcagtgctccatatcatcctcgaaggagcggtttaaatacacataagggatgtcgtactttgccaggttcatgatatggtcatgctggctggtgaccggggtaatgatgaccccggctatatccatgccgattaaattttctaaaatctgtttttctttttccaggctgtattccgtgttgttcaggtaaatgatatagcccttttctgctgcacaggcttccaggtactgttccagcttggtgtagtagatattagtcagggaaggcaggaccagagccagagcctggcggcgtccggtcttcaggttgacagccagggtgttgggccggtatcccagttccgcaactgtttccagtattttctgctttgtctcttcttttaagtatcctttgccggaaagggcgcgggaaaccgtgcagacggaatagccgcatctttttgccacgtctttgattgttaccatattccggtccacctccctgtgattcactgaaaatgtatacacagttattgtaaaggtttcttgaaataatgtcaaaatgaaagcagaaaaaaaacaggaacttttaaaaaataagtcgaattgtgaagattgcataaaaataacgttaaaattctgttaaacttttttgcagaaactacttgatggaaaatatgtaaacgtttatactaaatgaggaaaatatgtaaacgtttagcgaaagctgttacgctggacaacgtaaggaaaggggataacaatgaaaaagagagtattattagcaggtgttcttaccgcagcaatgatggcagttacggcatgtaacggcatgccgggtatgggaaatgcccagccagctgcaacccaggcaaaggaaggggacagcagtggggctgctgcaggcgatgacaaggtatatgagttaaagatttcaacttcccagacagagcaggccctgattaccaggaactaccagaagctggctgatgtgttaaatgagaaatcaggcggcaggctgaaggtaagtgtgttcccgtccggccagcttggcagtgacgaggatgtgctggagcaggccatccagggcgctaatgttgcagttaacacagatgcttcccgtatgggacagtatgtgaaggatttctccattctgatgatgggttactttgcagataactacgaggagtgctataagataacacagaccgatacatttaagggctggacagattccctgtccaaggaccatggaattaaaatcctgtcctttacattctacgacggcccgcgccattttatgacaaacaagccaatcaacacgccagaggacttaaagggcatgagaatccgtaccatcggacaggaagtatgtaccgagaccatccaggccatgggcgctactcctatttccatgtcatggggcgaggtttacaacggaatccagtccaaggcactggagggctgcgaggcacagaacacatctacatatccatccagactgtatgaagtgtgcaaatatcagtccaagacaggacacttccagctgatgcagggattaatctgcggccagagctggtttgagagcctgccggaagatttgcagacactgctggttgagacctccatcgaggttggccaggaaacagctgctgacgtaatgacagaggctgacgaggctgagaaggcaatggttgaagcaggaatgaccatcgtagagcctgaccttgctccatttaaggcagccgttgatcctgtatatgagaaacttggctatgctgaactgagagataaactgtacaaggagattggtaagaccaactaattccaaggtacattccgcaatacagaaaggaagcttttaaatgaaaaaaatttctgctgttattttaaagacagaggagcttctggccggtgcaatgttatgcatgattgccgttctggtgttctggtccgcagtggccagaaccatcggaatgccggtgaactgggctcaggatgtttcgctgctggcatttggatggctgacctttatcggctctgatatcatcatcaagagcggcggcctgattcgaatcgacatgctgtccaaccggttccccaaggcggtccagaagactctgatgctggtgtttgacgttttcatgctgctgtttttattgatactgattgtttacggattcctgctggtatcccagagctggaaccgtacctttaataccctgaagatgagctatgcctggtgtactctggcagtaccggtgggctccctgctgatgtttttcagcatgattggcaagatgctcggtgatatcaggaaaccaatgaaagaatggggggttaattaatgttaagtgctgttggatttttcttaatactcctgttcctcggaatgccggtggcctttgccattgcagtgtccggattttccttcttcctgatgaggcctgagattccgtggacgattctggtgcagaaatccctgtccaccacccagtcctttaccatgctcgcgattccgctgtttatttttgccggcaacctgatgaacaacacaggtatcacatcacgtctggtaaagctggcaaacgtgctgaccggccatatgtacggttccattggacaggtttccgtggttctctcaaccctgatgggcggcgtatccggttccgcagttgcagatgcagccatggaatgccgtatccttgggcctgagatgacaaagagaggctacgcgccgggctgggccgctgcaatcaactgtctgtcaggactgattgtagccacgattccgccttccatgggcctgattctgtacggcactgtgggtgaggtttccattggccgcctgttcgtagccggattccttccaggcatcattatgtgtatcttcatgatgattgccacatcctggtccgcgcgccactacggatatcagcctgaccatgacaagccgtcacctccaggggttatcatcaagtcctgttttgagagtatatgggcgcttatgttcccaatcctgctgattgtgctgattcgtttcggtgtcatgaccccgtcggaatccggtgcctttgccgtattctacgcactgttcgtaggtatcttcatttataaggaactgaaccttgagaagtttaagaagtgtatcgtggacagtgttaaggatttatccgtgattaccatgattctggccttctccggcatattcagctacggcgttgtatttgaccagctgccaaagaccctgaccactttgctggtaggtctgaccagcaataaatatgtgcttctgctgctgattttaattatgctgactgtgtttggtatgttcatggagacaacggtcatcaccctgatcgttacccccatactgattccgattatcacacagtacggaattgacccggttcacttcggcatcatcatgatgaccattgttaccatgggctgttccacgcctcctgttggagttgcgttatacacctgttccaatatcatggactgctcggtgcaggagaccacgaagtattcgctgccgttgttcatagctattatggccacgctggctatctgcgtattcttcccggatctggtgctgttcctgccaaatatgatttatggtacaagtatgtaatctgatttttataaagcccggcaagggctgcctctaaggggcaggccttgccgggcttttaggatgattattttttaaatctgggacagacccataaaccggtccaaggataatattttattcgacagctttaattcccatctcatctaactgtttcaaatgatcgcgcataccctgcaatacttccggtgaatgtcctttccatcccatagcttcagcaacaatttttaacggctgggttgttcggtatgactttgtcgggttcccgggaaatttcttatccgttacatttgggtcgtcttcaaattctcccgttggctccacaacaaaaatccgctgctttccatctcccgaagccagctctgctccccagatggcagcgtccaaggtccctgtaaaataaacatagttggcagccctgttttcatcataattagataaataccccggcaccaacagatcccccacgcttaaatccgctctggttccatgaaaaaacgtgccgggactaaatataactgaattgctcatgcaaaacctcctcaaaatataaattattttcaagcgttcaacaaaaccgcagcgctgcaaaatgcgtttactattcggaatatccttaaaatcggcagagccagccacagcccggtcatgattgcggattaggaaccaaaagctatgccataagtaatcgttaggattcttttctgttttttctaattgtccttttacgattttgagaaaaagcccctccattggctctgccggataagaacagtttaagtctttctccaggtttggtatgtcctccgccttatccgacaaaggcggatattcgtgtttcttatgttctgaattttaatgtgggttctgtctggtgcctttatctattctcatattgtgccccaaggttagatggcttgtttgaataaataattagagctaataagactcagataacgaaagaaatatacatacaaaaatgtaataagtggtcataaatgtggaacaccgcaaagcgtatattacgttgccctggctgccgctgttctttttaagaataacaatcattccctgatgggtatattcctgttctttatactctaaattttaatgaggaatctgtcaagttgtttcatctaatcttatattgtgcctcaggtttttatgaaatcaggatgggagtcaggcaggattttggtcagaacatgacctgtaaatattttacagcataaactggaaaacgccgttaaacacactgttcatcagccttcccgctgtgcccgctcctgcagcagccgttctttggcttcggctgttgtttcgccttcttttgtaagataggtttctacaaaggtatcttcaattttggtgtatctgtctactacactgtgctcaatgttgaaaaagactttcgtaagtgcttcagcgattttttcatttgtttttacaagttttgatgttgccataaattattatcctttcttttcatatttctctgccatacaaatctgcagtaattaagagtacaaatgattaagagcaatagcgggggaattatccagcctgatttcattcttttatgcctatagccagtggaattaagcaaagcagaattacaattccggcaaggccaattacaatcccggcagtcattttaccccatatcatgctaaagcacatcccaactccaaacgccattgcaccggcaattcctatcacaattgacaagatcacctttcctgaaaatcggacaggctctttatgctccattcttctccatataagcactgtaatcaaagccagcgccagaccagcacttcctaaggcaagccctggtttgaaagccccccactccgggataagagccatacacatgccgagagcgaaaagcaccccgcttacggttcctgatatcattgcggcaaaactactttttttcatgtaaagtacctcctttatttttattaaatcaacgcttgttggtttaatctggatatagtataatgcatttataaaacaaaaaacaatcaccaataacgggacaagtgttgagataaaggggattttatgaatacacccaataacaaacggaagaaagagtccattgaacggattgaaaaggtttttatcagtttgcttcagactaacgagctaaatgaaatcagtgtatcggatatttgtaagctggccggattaaaccgcacgactttttatgcaaattatacggatatttacggattggctgactctatacgggacaagctggaacataacttatctgacttgtaccaaaatgaaatcacccggggattcaacagtaacgattatcttaaattgttccgccacataaaggataaccagatattctataagacctatttcaaactggggtatgacgacagctataagattattacttacgatattaaccttgcacggcagcattttgagaatcgttttattgaataccatatggaattttttaaaagcggaatcacaaaaattatcaaattatggcttcaaaacggctgcaaagaaagcccggaagatatgtatgaaatcataaaaagcgaatatcaggggcgtgcggatagcgggaaagaatgttcagacacactctgacatcatccgcctgcattgttggatgtgcataaaatatctgcaggaagattggccgcattagatattgatttccttttaaatgactgttatattgttagagtatcaattgttctttgaaaaaatcatatctatatcgctgtttaaaacatagctgggaccacgggcatacgtttagtatcacggatactgaatccgtatggatgcatcgtggacacccgtgccgccggcagtataccagtcatatagtctatgaagcaaagattgtttatgaatttacatcaggaggtaatcatgaaaggaaccttactcgtaaagaacgttaagcatcttgttacatgtgacggggatgacagactgcttgacggtgtggatgtgttcatccgggacggagtcattgccggaatcggacaggaagcaggaacactggaatcaggaacactggaatcaggaacagcggaggatgtgattgacgcatctaatatggtgatgtatcccggacttatcaatacacaccatcatttatatcagacgttcagccgcaatttaccgcaggtacagaacatggagttatttccatggctgaaaacattatatgagatatggaagcacgtggatgaggacgtggtctgttacagtgcgcttacaggcatgggagagctgttgaaaacaggctgcaccacctgtctggaccaccactatgtgtttcccgggtcagccggggacgggctgctggacgcccagttcggggcagcggatgccctgggaatccgtttccatgccaccagagggagtatggatttgagcgtgaaggacggcgggctgcctccggacagcgtggtgcagaccgtggaccagattctgaaggattcagaacgggccgtgaagaaatttcacgacaaaagcaggtattccatgcaccaggtggcgttggcgccctgctcccctttcagtgtgactgggacgcttttaaaggaatcggcacagctggccagagagctgggagtcaggctccacacccatctggctgagacaaaggacgaggagcggttcacaacggagcgtttcgggatgcggcccctggagtatatggagagcctgggatggatgggggaggatgtgtggtttgcccatggaatccatttcactgaggatgaactgaaacggctggctgagaccgggaccggggtagcacattgccctatatccaacatgaagttatcttccggcgttgcgctggtgcctaagatgctggagcttggagtgcccctggggctggctgtggacggttctgccagcaatgacggctccaaccttctggaggagatgcgggtggcctatctgcttcaccggctctggtggagccggcaggcgccgtctgcttatgacatcctgaagatagcgaccaggggaagcgcccgcgtgctgggaagggatgacctgggacagatagcagtgggaatggcggcagactttttcctggtggacatgaaccggatggaactgaccggcgcccagtttgaccccaaatccatgctgtgtaccgtagggcttaagggcagtgtggattacacggtggtgaacggggaaatcgttgtaaaggagggaaggctggtccgcgtggacgaggagcggaccgtggaaaaagccaacctggcggtaaaagaatatatggggcgttcgtcatgttctgtactgctgtaggcggcagggaggcaggcgtttagtgaagccgtctgaatgaaacagagagacggcaatggagacggattgacaggctgtacataaggagctgcgtttattaaaccgcgcggctcctttttttgcgtaccggcaaggattctgcttctcctgttttttcacagtattttcaaacttattaaaggttggctaaaggtttcaacgttatgataactggtagaaaatacagatgccccattgggcaaaaggaggaaattatggaggaagcaatggtaatcagaagggatggaacaggtaagcggtttggggttctggccgtccttatggcggccgtattcctggtattcatgggtacgcatacggtttacggagccggcggtctggacctgaatacggactatccgggaatatcggtaaagccgggagacagcctgaatattcctgtcacactggagaactacacaggggccagtctgaatgcggatttggagatcactgccatgcctgagggatgggagggatatctccagggcggcagctatcaggtgagccgcgtccatgtaaagaacggagaagagggagcccaggtgacccttcatgtgacggttccaaaggagctgacagaggggacttacacggtggaggtaaaggcgtctgcgggcgggggtctcacagccagtctgcccgtctcgtttatggtaaatgagatgaatgcgggaaagggaagctttacctcggaatacccccagcaggagggaaccagggggaccagtttctctttcagcaccacactgattaacaatggacttaagacgcagtcctacagcttatcatccaatgcaccctccggctggggtgtaagctttacccccaccggtgagacagccaaggtggctgccctggaggtggagtccggcgccagcaagggtatgacagtgtcggtgacgccgcctgagggggttgcggcaggggaatatgacatatcctgcagcgctgtatcggcggaggagacccttgacaccagcctgaaggtggttattacaggcagctacggccttaaggtttccaccccggacggccgcctgagctttgacgcctatgcagggaggtcttcggatgtgacgcttaacattaccaatacaggcaacgtggatctggagaatgtgacgcttaactcatccctgcccaccggctggaccgtgacctacaatacggagaacaacatgatcccgtccattcccgcaggaagcaccacagaagttattgcccatgtaaagccttcttcggaagcaatcacaggggactatgtgaacacgtttacggcatcctgcgagcagacccagtcaaacgctgatttcagggtatcggttaagaccacgacaatctggggtgtggtggcagttgtcatcatcctgtgtacggccggaggcctgggctatgtgttccgcaaatacggcagaaggtagcttgtatggatagttggctggaaaggggtcattgttatggattatgaggaagaaatgatgatacggaccgaacacctgtccaaatcctacggggagaaggaagcggtctgtgatttgacactggaaatccggcggggggaaatattcgggctgctgggaccaaacggagccggaaaaaccaccaccacccttatgctgttagggctgaccgagcccacgggcggcagtgcgtacatagacgggaaggactgcgccagacaggccatcgacgtcaagcggatggtggggtatctgccggataatgtggggttttactccgacatgacaggacgggagaacctgcggtttacagggcagctgaacggactgcccagtgatgtgacagaccgccggatggaggagcttctggaaaaggtgggcatgacggaggcagccgaccagaaggcgggaacctattcacggggaatgagacagcgtctgggaattgccgatgtcctgatgaaggacccgaaggtggtcatcatggatgagcccaccctgggaatcgacccggaaggaatgcgggagctgatgaccctgatacgcagcctggcggaggatgataaaaggaccattctcatatcatcccaccagctttatcagattcagcagatttgcgaccgggtggggctgtttgtggacggcaggctcattgcctgcggaaggattgacgagctggcagggcagatgcgccgtgaagggcattatgccctggaggcagctgcttttcccgatgacagcggattcgaggaactgctaaggagccttggcaatgtggagcaggtggagcggaccggcgatttctatgtagtccattccaggtcagacctgtgcagggagttaaaccgcagggccctggaaaaaggctataccctgcgccacttaagacagcggggaaacgacctggatgaaatttaccgcagatattttgagaaaggagagcagaaaaatggtggtctcaatcaaaagaaaaataaaggattcctttctttcggcagggaacagcggtaataatatgccagacaaaggtgcacagataagaccgtgtaatggcatgggcggcatggcggccttataccgaaaggagatgtcggaccacatacgcagcaaacggttcctgattgtgctgggactgattctgctgaccagctgcgccagcatatacggggcgctgaccggcctttcggatgcggttgcgtctgattccagctacattttcctgaagctgttcaccttaagcggaagctccatcccgtcctttacctctttcattgctctgctgggaccttttgtggggctgagcctgggatttgacgccatcaacagcgaacgatccgaggggacgcttaaccgtctggtggcgcagcctatttaccgcgatgcagttataaacgggaaattcctggcaggcgccacaatcatcttcctcatggtcttttccatgggactcatcgcaggttctgtgggacttttggccaccggggtgccgccttctgccgaggaagcgggaagggtgctggtgctgctgtttttcacctctgtgtatatctgcttctggctggcgctgtctatcctctgttccgtgctgtgccgccatgcagccacatcagctatgattgtgattgcgctgtggatcttcttcgctctgtttatgaccctggtggtgagcattgttgccaatgccctgtatcccatggggcaggccgcatcggcagggcagattctggataattacagctgccagatgagcctgaaccgcttgtcgccttattacctttacagtgaggcggtttccaccatcatgaatcccatggtgcggtccaccaatatcatcctgccccagcagctgtcgggcgccatcagcggttatctgtcactgggacagagctgcctgttggtatggccccatctgacaggcctgctggcgctgacggccgtggtgttcgccgcttcctacatcagctttatgagaagggagatacgcagcagataaaagagcggtacgggtttgtgaattatctgtgaaatccacctctgttctcttgcggttcatacagaattgcgagagaatacaggtggatttttcagacatggcgcaacacagggagtggatatagatgagagttttgattgtggaggataacagacggctggctgagtccatccgtgacatattaaagcattggtatgactgcgatatctgcggggacggcaataccggctgctggctgttaaaggacggcggctatgacgcagctgtcctggacctgatgctgcccggaatggacggaatcaccctgttgcgggaggccagaaaaatggggtgccaggttccggtactgatactgacagcgaaaagcgaactggaggacagggtgacggggctggaaagcggagctgattattatttgaccaagccctttgacatgcaggagctgctggctgtcatgaagaccattttaaggcgcaggggggagatgatacccgaaaacctgaacctgggaaatgtatccttaagccaggcggactacaccttaagagggccgcacaaaagcatacagctgggcaaaaaggaatatgacatcatgcgtattctgatggtgaaccgggatatggtggtttccaaggacacccttttgtccaaagtatggggaaatgacgcggaggcagtggagaacaatgtggagatttacatatcttttttgagaaagaagctggatttcctcaaggcggatgtgatgattgtcaccatacgcaagctgggatacaggatagtggaaaaggacggcagggaggtgctgtgatgagggaaataggcaggcttcggcttaagtttatcatttacaatatgctggtggtgacagcggtcataggaataaccttctgcgcagtgacctctgtggtgaagcacagggtaaatgaccaggggagcctggcgctgtccagggtggtatcaggggaggaacagtccctgatatttgctgccatgccgccggtacggatgccgtatttcactgttctggtgggggaggacggtgtggtgtcgctgaaggaaggatatggtgcttactgggaaccggaattcctggagcagatggctgtcctgggcatgaacggggaggaggacatgggaatactggacgcataccatctgaggtatttaagaatcagccagccggccggttatatgatcgcatttgcagataccacctatgaggattcactgagaaacgggatcatgaaatacggcggaatggcctgtgtggctgtgtggcttgggttcttcgcgctgtcctatttcttttcccggtgggccgtaaagccggtggaggagtctgtccgcatgcagaagcagttcgtggcggatgcttcccatgagctaaaaacgccgctgaccgtgattacggccaatgcagagcttttacaggagcggtatgcaggtatatcggcagaggcggacaagtggatggagcatgtaaaccaggagtgcagggaaatgcgcgccctggtggaaagtctcctgcttctggccaggaacgattcctatgtaccggggaagggagaatttacccggttcagcttaagcgagctggttatggagaagatactgacctttgaacctgtgttttaccaggaggaaaaggttctggagtatgacatagaagatgatgtgctgatgatgggaaacccctgccggatggggcagctgattaaggccctgatggacaacgcggttaaatactgcgtacccaggggacgggcgcagataaggctggagaagacaggccgcagcagggccaggctgtgggtgtgcagccagggagaacccatacctgaggataagcgcacattgattttcaggaggttttacagggacgacagcgccagaagcagcacaagtggttatggcctgggactggccatagcggcagagacagccaggagccacagggccaggattggggtggagtataaggacggaatgaactgcttttatgtgacagtgaaaaggaagagggggtaaaagcgggtggtattaaaaagacagtattaaaaaggggaatggtattctcctttttattttaacaggaatgtgttagaatgtttttatatattgaaacaatacacgcaaacggctgcctgctgcagtctaaggggaggactaggaagatggggaaacaaccgcgggatgcggagaataccaccagggccttttttaaggaatacatggtaaaccggaatgtggaagccacgcttgactggctgatggatgatgtacagtggattggcactggcaagggtgagtattcctgcggaaaggaacaggtacttgaagcactggaacaggagttttcactggacccggacgcctaccagcttatatgggaggatataagggagaacagcctcgcccctgactgcgccgtcatgcagggcaggcttactgtggtgcgcatacttcccgacggcgagaactttgccatgggcgtgcgcgttacatccacctgtgtccgcacagcggaaggttttaaagtgtcttccatccacgcgtccgtacccgctgattttcaggaggagggtgaattctttcccctttcctttgcggaatccgtaagtgaggagtatgcccgccgcatgggcagaagcgccctggagctgctggggaagactatcccaggaggtatgctgggcacctactttgaaccgggctttccgctgtactatgtcaatgacaggatgctggactgtctgggatatacatatgaagagttcagccaggatagtcagggcatggtgggtaactgcatccatccccaggaccgggaaagggtgtacggggtggtccgggacgcctttggcaaagtccgggattatggggtgcgctaccgcatccggaaaaagaacggccggtatatccatgtatatgagaccgggaattttgcccaggcagaggatggaagagatatctgcctgagcgtggtccgggatatttccgccgaggtggaggccgaggagcggctgaaacaggagaaccgggaaaaggaacgccaggccggccggtacgaccagctgttccagtcggttctgtgcggcatcatgcagtggaagccgctggaccgggaacgtgtggtgtttaagaatgccaaccgggagagcatacggattctgggatatgagccggaggagttctggtcccacggagtctggcaatggaaggagctgattgccgaagcggattaccagatgaagctggaccagctggacaatctggaaaaggcaggcgacagcatgaatttccagtaccgtgtccgccagaaagacggaacgtcctgttggatactgggaaaactggagatggtggaggacggggacggggagctgattgcccagagcgtatttctggacattgacatccgcaagcgcaccgaacaccagaaccagcagcttaaggagctggccgaggcaaacagcgccatactgaatatggctctggagcacacatccctgtgcgagttttactattacccggaccggcggacctgcgtcattccggacaggaccagcgcccggtaccagtgcggcagccggtatgtgaatatgccggacagctttgcacaggagatggtggtccctggaggccgcagggattttatccggatgtacgaggacatccacagcggaaaacgaactgcctccgcacagtttctgactgtcaaggattcctggtgccgggtgaccatgtccgcggtggaatacggagaaaacggacagaacggaaccgttctgggaatcatagaggacattacaaaggaacagaccatggctttggctttggaggaggccaaatccaaggatttactgaccggactgtggaacagggaggccgggaccaggatagcccaggagtatatggcccaaaaacccctgggagagcgctgcgccctcatgcttctggacatggataactttacccgcatcaaccaggaggaaggcgttgcctttgccaatgccgttctccaggaggtggccgatatcctgcgggctgagacggagccggatgatataagggtgcgtatgggtggcgacgagttcatgctggtgttaaagggcaggggaaaggccggggcaacggtgacaggtccccgcgtcgcggccagggtccgggagctgttgcttcagtcggacaaggacatcagcatatcggtcagcatcggcatgtgcgccaccgaggtggtggacgagtacagcggcctgtaccggtgtgcggagagcactcttaaatatgtgaaggaaaactgtcagggcaatgcggcctgttatctggacacctccaacgagctgggggagatgctgacggacctttatacggagaaacaccagctcaataccatagagcagggcctgaccgagcagagggaggacctggtctcctttgccctggaccttctgggaaaggcaagaaatttaaacgacgcggtgcagctgctctttgccaggctgggcaagacgttcggcctggaccgggtgtctcttctggatgtggaccgtgattatctgacctgccgcttcagctaccagtgggccagggataagacagacctgatgatgcataagaccttttacattacaagggagcagtatgagcagtggcccggtcaatttgacccatcaggcctgaacagacacgctgtctatgatgagtcgtccatgagctgtctccaggcagccatatggaaccagggcatgtttgccggcattctgagctttgaggtgaagacggacggatacagctggaacgacgagcagaggaagcttttggaggagctgagcaaaatcattccgtcctttgtgatgaaagccagggcggatgccgtaagccaggccaagacggatttcctgtcgcggatgagccatgagatacgcacgccgcttaacgccatagtgggcatgacctccatagccagaaatgtggcggatgacagggaccgggtgctggaatgcctggataaattagagacatccaaccagtatctcatcagccttatcaatgatatcctggacatgtcccgtattgagagcggaaagatggagttgaatgtacagcccatggacatggaggatttcgtcagatccctggagggcatgatgcggccccaggcagagcagaaggggctgcggtttattgtggaaaacagatgctgtcagggactggctcttgtgacggaccgcctgcggctggaacaggtgctgattaatattatcggaaatgccgtcaagtttacaggagagggaggggacgtgatattttccatcacaccggaggaaggaagctccggaggccagcgtctcacattttccgtaaaggacacgggaatcggcattgcttcagaagctatggacagcattttcaatgcctttgagcaggcggagaaaaacacttctgtcaaatacgggggaaccgggctggggcttgctatttccagccgcctggtccagatgatgggaggcacgctgggagtacgaagcgtcctgggagagggatcggagttctattttaccctgactctgcccattggaaagctggacgggcagaggccccgcagcagagagccggagcaccatgatttccatggcaagcgtttgctggttgtggaggataacctgttaaaccaggagattgcacagtcgcttctggagatggagggctttctggtggagacagcggaaaatgggcaggctgccctggatgccttcggaaatcatgaaccgggatattataacgcggtgctcatggatatacgcatgcctgtgatggacggaatcgaggctaccagacgtatccgcaccatggagcggccggattccagaaccattcccattatcgccatgacagccaatgcctttgatcaggacagcaggaagtccctggacagcggcatgaacggccacctgtccaagcccattcgtgtggaggaactgctgagaatgctggatgcatgtctgtaaacggataaggttgtggatattagataaaaaaacagaaggcatgttcagaaattacgacaaaattacttaaaaagcggtttttaccctccttcttttctgctatgatgaaatcatcagaaatgagaaggagggtattattatgaagaaaaaactggcacttttgttggcatgctccatggctttaagccttactgcctgcggaggcggcagcaagccggcggaaaccacggccgcgcctgagaccaccacggcagcagcttcggaggctgcaaaggaagagagcaaggaggacgcggcagaaaccacagcagctgaggctgcgggcggggacatggacgccctcatcgaggcagccaaggcggaaggcgaactgacggtatacggctcctgtgaggaggaatatctgtctgctgcctgccagaatttcgagaagctgtacggaatcaagacaaaataccagagactttccacatcagaggtttataccaagatatccgaggaagcaggcaagccgtctgccgacgtatggtttggcggaactacagacccctataacgaggcagtggctgacggtcttctgatggagtataatgccatcaatgccaagaacctgatcggtgaccagtacaaggatccgaccaactgctggtatggtatctataagggaatcctgggcttcatggtcaatacggaagaactggaccgtctgggcctggaagctcccaagacatgggatgaccttaccaaggaagagtacaagggacttatcatgctgtccaaccccaacacggccggcacggcaaaactgctcatcaacaccatggttcagatgaagggacacgatgaggccatggaatatttcaaggccctggacaagaacatttcccagtataccaagtccggttccggcccatccaagatggtaggcccgggcgagtgcgtaatcggaatcggtttccttcatgacggcatttaccagattcttcagggctatgacaatatccagttaatcgttcctgaggacggcacctcctttgaggtgggcgctaccgccatcttcaacggatgcgcacatccaaacgcagccaagctgtggattgaatacgccctgtctcctgactgtgtggaccacgccaaggagaatggctcctatcagttcctggtattaagcaatgccacccagcctgaggaagctacgaaatttggtctggatatgaacaataccattgactatgattttgaggatgcaaaggaaaacagtgccaagtatgtagaggacttcttcgcagctcttggaagctcctccgacagcgcggactccagccgtttcttgacagaataggcagagcttctgccggtgtccggcacttggaaacgtaatgtagtgtaagcctgcaaacgggtgctgcgtaatggttgacatcattcattacgcagcatttgttacattatggtcctggttcggcaaaagggatcataagaaacagagaggaaagaaatcaagaggaaagaattcctcgggaaagggggcctcattgtggccagaaaacagagcgctgagctggagcgcaagaaatttttttcagaccccatactggtgagtatgattgtggtactgctggtattcctggcattgtttatcctgtacccccttctgatgctgctggtagacagcttttattcggaaggtaagattaccctggaggtattcgggagggtgctgagcctggagcggttccagaaggctttcaaaaacaccctggtattaggcatgattacgggaatcgcatccactgccatcggcctgctgtttgcctatgtggaggtgtatgtaaagcttaagacaaaggtgcttgagaagctgtttgccatggtttccatgcttcccgttgtttctcctccttttgtgctgtctctgtccatgattatgctgttcggacgaagcggcatcatcacccgctcccttttgggaatctatgattccaatgtatatgggcttaagggaatcgccattgtgcagacactgacctttttccctgtatgctatctgatgcttaagggactccttaagaatatcgacccctccctggaggaggcaaccagggacatgggagcctcccggtggaaggtgtttaccagcgtcacattcccacttctccttcccggactgggcaatgcattcctggtaacctttatcgagtctgtggcggattttgccaaccccatgctgattggaggttcctacgacacactggctaccaccatttacctgcaggtaacaggggcctatgactccaccggagccgctgccatgtccgtggtgcttttatccctgaccgtggtcctgttcctgatccagaagtattaccttgagaagaaaaccgcagccacccttacgggaaaagcttcccgtatgaggatgctcatagaggataagagcgttacggttcccctgacctttttctgcggcgccgtgtcagcctttgtcatgctgatgtacattatggtgccctttggcgcgctgtttaccctctggggcagggattacagcctgagccttaaatggttccaatatatgtttaagaccagcggacttaaggcttttaaggactcctttgtcctgtccctgattgcggctcccctgacagcttttctgtccatggtcatctcttatctggtggtaaagaaacggtttaaggccaaagggttcatcgaatttgtatccatgctggccatggcggttcccggcaccgtgctgggtatcggatatatcaggggttatgccaacggtctgttcaggaccggcgtcatgagcggcctttacggcaccggcctgatcctgattatcgtattcattgtgcgaagccttcccaccggcaccaggagcggtatctcagccctgcgccagatagacaagtccatcgaggaatcagcctacgatatgggcgctaactctgccaaggtgtttatgaccgtaacccttcccctgattaaggattcctttttcagcggactggtgactgcctttgtgcggagcatcacggcaatttccgccatcattcttctggtaacgcctgatttcctgctcatcacctgccagatcaatgagcaggccgagaagggaaattacggcgtggcatgcgcctatgcaaccgttctgattatcataacctacggcgcggtgcttatcatgaatacactgatgaagttcttcggagtcagcaggaagataaagcaggagaattaagcgctcatagcgggacgctgcgctaagcggccaaaggacgcccgcaaagcgccagtggcatgcatcgcacgtaagcgtctaaaagacagacgccaagtgctcatagcaaggaggaaagttgatatggagaaacagaaaaagggtgttcgtctggaacacatttccaaaatatatacagatccaaagacaggaaaggaattctatgcggtgcaggataccaccctggatatcgagcccggaagcttcgtgacactcctggggccttccgggtgcggcaagaccactaccctgcgcatgattgcgggatttgagagcccggatgagggggatatctacctgggggatgaggctatcaatgccctgacacccaataagagggatacggccatggtgttccagagctatgcccttctgccccattacaatgtatttgacaatgtggcctatggccttaagatacgcaagctccccaaggaggagattcatgagagagtcatgaacatccttaagctggtggagatggagggcatggagtcacgtatgaccaaccagctttccggcggccagcagcagcgtgtggccctggccagggcccttgtcattgagcccagcgtactgctctttgacgaaccattaagcaatctggacgccaagctgagggtcaccatgaggacggaaatccgcaaaatccagcagaaggtaggtattacggccatctacgtgacccatgaccagtccgaggccatgagtatttccgataaaatcattatcatgagcaagggaaaggtggagcagattgggaccccaagagagatttactaccatcccaactccaggttcgtggcggactttatcggggaagctaatttcctggaggccagggtcaggtccgcaagcggcgagaaagcggtcatcgacgtggtgggtcaggagcttacggtgaacaatttcgcaaaggcagggccgggggatgacgcggtgctggttatccggcctgagggagccaccctggcggagcaggggcttttggaaggcactgtcaccctgtccacctttatgggatcctatcagtattatcaggtcatggtggggaacatggagattcagattacggattacaatcctgtaaaccgcaggatatacgaggtaggggagaaggcatacctggatttcgatcccaagggggtttacatcctgtagacgcattggtacaataggcagtatgaggaatcggatgcgtatgaaaaagagttggagcatatatattgcagtgataggaatgtccctctgcctggccggctgcgcaggcagcgggacttctgcggctgcgggccatagggcaggtgcggatcgtgcagcaagcacggagcatggggctggcacggactctggggcaggcacggagcatggggctggcagggaccatgcaggggatgaggagctggtgatttactgcccccatccccttgagttcatcaaccccattgtggctgaatttgaggggcggaccggaatacgggtctatgtccagaccggaggcacaggggagctgcttaagatggcggaggaggggagcgatcctccctgcgatatattctggggaggttccctgtccaccaccagtcccaagagggagctgtttgaggcgtacataagctgcaatgaggatatggtgcgggatgagtttaagaacagggaaggcaatatgagccggttcacggatattcccagtgtaatcatggtaaatacaaacctgattggggatgtgaaggtggagggctatgaggatttgttacagccggagctgaaaggcagaatcgccatgtgcgatcctgccacgtcgtcctcggcctatgagcatcttatcaatatgctctatgcgatgggggacggggagccggagcagggctgggattacgtggaggacttctgccggaacctggacggcattctgttaggcggttccggggaggtgtatcagggagtggcccagggaaaatacgccgtgggcctgacctttgaggaggcggccgcccactatgtggcggacaggggaccggtaaagctggtgtatatgaaggaaggggttatctccacgccggacagcgtctgcatcgtaaagggcagccgccatatgaaggaggccagggagtttgtggactttgtcacgggcagggacgcacagaccgttatctccatgaggctggaccgccgttctgtgagaatggatgtggaggaaccttcctatctgccggataaggaggacatccacatcatatacagcagggaggacgaggtgaattccagaaaagggatgtggctggagcattttgcctctatttacagcagagtgcttgaggaggatgggggcatgtccggggaggtgggaagccagtgaagaaggaacggtatttccgccacgagctggagcgcatgtttatcgcctacgccattgtccctgcggtcatatttaccatggtatgcggcatgcttttcatgaccgtgctgctccacgggaaaaggagcggcaatattgagcacaaccggtatgtggcaggattgctggacaatgtgctggcccgctatgaggagggcgtggaggaaatggcttcgcagcccggctgctttgacaacatccgcgatccggacgggaaggctgagctgtttgggatattttacggcatcactaacagtctgggactggagggggatttgtttgtcatggacagcagcaggaacattcttctgtccagccggagtgacctcccccagttcctggatgtgccggaggatgtgtcctgggggatatttgacgatatggaccgggagcctcataagacggctctcaggctggcagaaggatggaagagcggcgacagtacgattgccataggccggagcgtgatggacgggaaccggaaactgggatatatcctgtgttccattcccagcagccagtttaaggcccttgtggacaagccggatatacagaccattatcgccgatccctttggctgggcttatgtcagcagtaattacagcttcttaaacagcagcaaccaggtcatgaaggtcctcagggagtcgggccggtatttaaaccatgagaaacagatgtacctggtatccaggcagcaggttcccaggggcgggtttaccgtgtattccatctccgatatccagaacatcgtcatttccctgggcctgggcagcggcctggtcatcacggccctggtgctcatgaccctgtggatgcttctcaactccaggaaggtgacggagaaaaagacagaggatttctataaaatcctggatgtgatggagaatgccagggacggggatctggaaggcgtcatacggatacagagcgacaatgagttcaaaatcattgccgacgcctataacgagaccatacagagcctgagaatccagatggagaacaacaaaaagatggcggagctggtgtccatggcccagaacaagcagctggaatcccagttcaatccccatttcctgtacaataccctggagaacatccggtacatgtgcaagctggagccggcaacagcggagcggatggtattcagcctgtcaaaccttctgcgctacagtctggacggcagcaaggcagaggtgacgctaaaggaggacttggagcacctggaatcctatctgaccatattaaaacgcaggttcggggaacggttccgatgcaggattgacgtggagccggaagccatggacctgcggattcccaagctggtgctccagcccatgatagagaatgcggtgaaatacgggtttggaaagcagctcaacctgactgtggagctgaaagcctatatccatgagggaaagctgatcatgatatgccgtgacgacggggtgggaatccctcagggaaccctaagcgagctgacagccctgctggagcagaaggaaaatcccagaaggcattcgggactgtataacattcacagaagaattgacatcctgtacggtcgcccctacggggtggagatcagaagcgcggagggacacggcaccaccctggtggtgaccctgccggtgaaaagagaggaatcagacggatgttgcgtgtgttgattgcggaagatgaagagatgatacgaaaggggctggtctataccacagactggctgtccatggactgcgtggtagtggcagaggctgccgacggccaggacggatatgagaagattctggagcacaggccggatgtggtcataacggatatctgcatgccctttatggacggcatagagatgataaagaaagcctcggagcaggttaggtttaagagcattctcctgaccagctacgcggattttgagtatgccaggcgtgccatcgaggccagggtctgcgagtacctgttaaagcctgtggacgaggaggccctggcaggcatcatggaacggctgggagaggaaatcgtgagcagccgccaggtggagcatgtgatggagcaggcggagatagaggggggcaacttaaacctggagtactacatgcagctggatttgtcggagaaccagtatgtatccagggccataacagccatacaggaggattttgccaggaagctgagcatagaatccatctccgatgacctgggagtcagcgccagctatctgagcaggaaattcaaggaggtcacgggacagaccttcctggactttctcaataaatacagggtacagcaggccattgtgatgctgggcaccagacagtacagaatcagtgagatatcagaggccaccggatttacggactacaagcatttctgctccgtgttcaaaaagtatacctctaaatctcccaccaagtttatcaaaggggtgtcgtgagaattcgtaagaaaccttacaattatctccatggatgaaattgccttgaccttagagcggctccatggtttatgctggatatgtcagaaatgacgccggcccggactgctttgtatcaaagcgccgggccatccccctttttaaggggcagttaaacaatcaggcatagtgatatttggtcctgtacttgcgtaaaaaataaagacacagcaggattccgccgaactctgcaatgggaatggccagccacacgccgtccatcccgatgataaagggcagcaccagcaggctggtgataatcaggccaaaggtgcgcacgaaggagatgatggcggatatacgtccgtcggacagggctgtgaacagggcggaggcaaagatggtgaagccggaaaaaagaaagctgcatgcaaatatcatgaatccgtgccttgccagttcatagacaggcgtgcccctgcgtgcgaaaatctctaccaccaggctgccgcccagctgggccatgaggaaaacggccagggaggaagctgccgtgaaaatgagagaggttttaaatacctgtctgagctgctgatggttctggcttccgtagttaaagctgataacaggggacacgccctgggaaaatcccatgaacagtgcatttagcagaaactgggaatactggatgatggtgatggcggccaccccgtcctcgcctgcaaagtgcatcatcagcagattgaacaggaaggtgatgacaccggaggaaaggttggtcaccatctcggaagaaccgttgagacaggtttctcccagctccttttttacaattcggggccgtacgaaccacaggctctttctggcagcggcaaagtaaatgaggccgataagggccgggatggagtacccggttaccgtggcgatggctgcaccggcaatacccattcccatgggtacaatcagcacatagtccagcactgcgttggcaatgcctgccagcagggtgaggaacaatccgatgccgggctttccctctgtcacaaaaaacatctggaactgaatctgaagcatgagggagggagcaaacgccagctgccagcgcagataggtgacgcagtccttaagaagcaggtcgctggctcccagcatacgggaaagggggacggccgccaggttcccaaggacggcaaagaccagcccgattatgatattcagcaggataatggtggtgaaggtttccctggcgctgtcaggccggccttcccccattttttttgccacaatggcattgcttcctgtggacagcatgacggagatgccaagtacgatgttgatcacggggtagacgatattgaccgatgaaagggcgttggtgctgacgaaccgggatacgaaaaccccgtctacaatggtgtacagggacatcaccaccatcatgatagtggtgggcagcgcaaacagcagcagggacccgaaggtaaatttttttgataatgaatgactcatattaacactcctgttttgattcaataaaataagtactgttggatattgattatttcagccgcaggtattatcatatgctatagggtaacccgatagtcaagaggagatttgcgaaaatggaaaaacagtcggaactatactttaccaccggagaatttgccaggatactgggggtcaggaaacatacgctgttccactacgacgaaataggcctgttttcaccggccctaaaggaggagaacggatacaggtattattttgtatggcagatggacatgttcgaggtgattcgtgccctgcagaagttggggatgtccctgggggaaatcaaggagtatatggaaaaccgttctccggagcgtttcatgtccatgatggacgggaagaagcgccagattgacgaggagatacggcgtctgaagaatatgaagcgcttcatccttcatgaggaggagtcggtgcagctggccatgaaggctgctctggatgagccaaggctggtggagagggacagggaatacctgcttgtgtcggacatcagcgcggggtcggagcggaaggctgcggtggagattgcggagcatgtgagaatgcaggaaaagtaccatgacacagtgggcgcggtgggatccatttacctgggagaggacatggaccggggcatatatgaccgctatgtgaaggtgtataccaggctggataagaaaactgcctcccgccgggttcagagccggccggagggagtctatgtggagctgtacagcagggggcatttgtgggacatggaaaagccctaccgcctcatcagcgcttttgcgggggagcgggggatccggctgggccagatgtggtatgaggatttgatgctggatgagctgacggtgaaggagtacgaacagtatatagtaaaggttatggtgccggtggagagtaaagtaataaatccttaaatagacaaaggatgcaccagatagtataatgtaaaataataccagatggatggaatgcagccatgaccaaggagaaaatcaaaatgaagcccagcatatggaggagagtggacatacaggtatccctattcactgcaattgtagtggccctgttgacattctccattttttggtttcagtacagaattacatacaatgataccctgatcagtctgagggaccaggcagaggccatatacggatatgtggagaaacgtctggataagagcacctttgaccaggtacggaccagggaagatatggagggagatgtctataagcaggcccatgaagcgttccagaggatcagggagatttccggtgtccggtatctctataccgcaaagatgaatgaggacggcgagttcgtgtatcttatcgactgcctggatcaatcggagccggacttccgctatccgggggacctgattgagcatgagatttacccggacatgcagcgggcactggacggacagaaggtgcttccggatcggattaaggacacggaatggggaaaaatatttatcacctacatgcccatatatgatggggaacaggtgctgggagtggtgggaatcgagttcgaggcaggccatcagtatgatacctaccggagcctgcgcctcctgcttccgctgtttatcctgctgttcagccttggggcctgtctcgcctccagactgttgttcaggcgcatatccaatcccttttaccgggatatgtcaaatacggattacctgacccagcttaaaaatcggaacgcatatcagctggatataggaaaccgcattgccgggaaggcccaggagggaacaggattcatccttctggatttaaatggccttaagcatgtaaacgataccctggggcatgatgccggagatgtctacattacctgcgtttcaaaggcatatctcaatatgcggaccagggaggcagtgatgtaccgcattgggggcgacgagtttgtggtggtgatgccggatgcggaccgggataagatacaggatttcatgagacggttcggggacatgtttaacagggaggcatccatgccggaatttaccttttcctggggatattccatctatgaccccaaggcggacgcggatctctacagcacgtgccgcagggcggacaagaacatgtacatgagaaagcagcagtactataagaataaaaacacataggaggatacagatgggactgttggacaagctgtttaagaagggaccaaaagcagatgaggtgtcaaagggcggttcgcctatttaccgctatgaggataaggagaatgagggctggaggccgccggaggcctatggtgtatacgcagaggagataaatgcccattttcagggactgtttcccaaccgggaggaatttgtgttccatgagcttttatcggatttggtccacattgatgtgaacattatgcggcccgatgaaacccatccctactatgtaatgtataccacgggcatgagcgatatgcccatgactctgccggaggaaatccaggacagggaggacctcaggtacggggaactgtatatgttccttccaaaggagtggaatccaggcgaggcaggccagatcaacagcgacattgcgcaggaggaatactggcccatcggactgattaagtatctggcccgtttcccccatgagtacagcacctggctgggatgggggcacaccattcccaatggtcctgattatgagcctctggcgccggataccggaatgggcggcgtggtcctggtacagaccggcggcgatatgggcagcatggaggcaaaggacggcaggaaggtaaacttctacatggttatacctgcatacagggaagagattgagtataagctggagtatggcatggaggcgctggacaagcggttttccgaagggaacctgcccatggtgctggatatccaccggcccaatctctgcgcggattttaaggagtaggcccggcgcctccgctttccatgaacttgaccggagagcatcctacatattttttaaatactttgatgaaatatttatagtccgagaagcccacaaggtctgcgatttcgtagaccttgtatttattttccttcagcaggtccacggccttctgcatccggtagcggttcagatagtcgttgaaggtataacctgtaaagcttttaaacttggagtttaagtaggtgcaggacatgccgcactgctcgctgatatccgtaagagaaaggtgggaactgtagtggttccggatgcagtccatcatgtactccacatggcggttcccttcgggactgtcccctgtttccggttcatccagtatgcctaacttacgcttttccatgtccagctgcttcagctcatgcctgagcctggccgctgcctgctgcttgtctttaatctttctgagagcgtcatagagttcgttaaaattcactggctttaaaagatattccgtgactcccaggcggatagccttcctggcgtattcaaaatcgctgtagccggacacaatgacggcgtcatagccgtactcctctatgctgtcctccagcatggaaagaccgtcctttacaggcatgttgatgtccaccaccacaatatccggatttgtttccctgattttttccagtccctccagaccgtccactgcctctcccaccaccacgcagtccgcctcctgccagtttaccatgaacagcaggcctttgcgtatgatgtcttcgtcctccacaatcaggaccttatacatatgtatcctcctccatatccgcgggaagggtgacgcttacccgcgttccgtttccgggggaactctcaatggtcaggccgtaggaagggccgtagagaagccgcaccacccggtgggaattatataatccgatatgttctctgtaaatatcctcctgatccagggcctcccgcagctccttcagcttttccgggctgatgccgctgccgttgtcctccacgctcagcaccagtgtgctgtcctttttacgggccgtgatggtgacggatacacagtgtttatccttcattccgtggaccagggaattctccaccacaggctgcaggagcagctttggaatcattaagtccatcagttcctccgggatgtcgatatggtaattgagcctgcggttatagcgcattttctgaagcaggagatagtcgttgatgtattcaatgtcggtctgcaggggcacaatggtgctcccgtaatatacgctgtagcgcatcaggttggcaaaggccatgaccatctccgaagccttctgggagtcaatggcaatctcataccggagggtctccaatacattgaagatgaaatgggggttaaactgttcctccagctgtttgatttccatggtgcgtttgcgctccgccagctcgctgttgtgaagcatcagctcctcgcgctgaattaccatgttgcggaacgcgtcgttgagcatccggaattcgtcaaatacctggcttttcaggcggtaatccatatttccccgcctcatttcctccaccgaggcctggagctcgtcaatggcctgcaggttctttttggttatgcgcagggtcaggggcggaatcatgatgaccataagtattccggccagccccagaaacagaatgccgtaggtcacaaggctgcgctggaattccatggataccagtgtgtacagaatcagggagctctcaggaaggacttccttgtgtatgtggtaatgcttgttgttgacctttacaatattgcccttctgccagtccatcctgtatttgccggcaggatatttttccatggggtccgcattctgccttcccactgcaaaaaccaggttgtcatacctgtctgtgatgaccacgtcgtctaacgggcattcccgcacagcctcgtaaatctgttcatccatcaaatcgaaaaacaggtatccgcagattccgtctgcgtctgcgacggggcgggccatgagcaggtccccttcctgtccgtgtgcaaaattcaggcggctgggcatggtatgggtcaggtcaggggcttcctgcattttttccaccaggctcttatagacggcgctgttcaggaatatttcgcggtttccctcaaataggctggagcttaccatgtgtccctctgtatctgtaagggcaaaggtgcttcgtatgggctgggatgtggtaaaaccgtagagcagccggttgacctgggtggcggcatccgcatttcccggtttcagggcatccaaaaagcggtaatctgtggaaaagtgttccaaaccttccttataggatgacacctggctgtccagggcggatgccagaagggcgttgttcttccggttgcttcccacgctgatccactggacattgatgaacaggaacagccccatcagcacaaagagcagtgagatgatggagcatgcatatttaaggaaagaacgcttgatgtaatccctgtactggttgcctgccatggcgggtacctcccggaagtagtgaagtacagtgccctcaggacactgtacctcctattatatcatagatagagactaaatgctgatatcgttgctgcctgtgaccttgaaaaacaccagcagggacaggatgcttgtcagggtcaggatggtggagtaggccgcggcattgccgaagttgctgcggatgacctcggcgtagatggctacggtcagggtctgggtcttgctggtataaaggatgatggaggaactgagctcgctgattaaggtgatccagctcataatggccccggagagcaccccggacatcatcatgggcaccgtgaccttcacaaaggatttcgtctcggtgcaccccagactgatggcggcttcctccacgctgggactgatctgaccgatgattgcggtgctggagcggatggtatagggcatccgccgtatggacagggatatgatgataataatggcagtgccgctgagcagcaggggcttgctgttaaaggcatacaggaaggagatgcccaggacagaaccggggatgatgtaggggaacatggtcaccgtgtccagtatgccggtgaggaaggacctcttcctgactgtcaggtaggatatgaggataccaaacaccaccacaatggcaatggcgcatattccgaacaggtaggtgttgaaaatagctgtgttattgttcttggagaacagggtgttcctgtagttttccagggaaaagcctcctgtgtatacggttcctccgcctgttgccaggaaggaggtgacgatgactgtaatctggggcaggatggcgatgagcaccactgcgtacacaaacagatgggacaggatgttgcgtgtgccggtgcatttttccgccaccatgggctttaaggcggtcatggagtaggtgaagcgtctgcccagatagcgctggaggaagaagagaaccagggttatgccgatgacaatgacgcagagcgcggcggcaaaatggtcgtccgtgctgacctcacccatgaactggctgtaaatcagcaccggaaaggtcttatagccctcgccgatgagcatgggagtaccaaagtcagagaacacgcgcatgaacaccagcagggagctggccagcatggtgggcattaccagggggacgatgatctgcatcactctctggaatgcggtgcagccaaggctttcggctgcctcgttcagggaattgtccaggtttttcagggcgccggatatgtacatgtacaccagggggaaggactggagggagaataccagcacaatgcccgcaaacccatagatgccgcccagctttatgtgaaagaggctgttgagtatcttggtgaagaaaccgttgcgccccaacagctgaatccatgcataggcccctatgaaaggcggggacaggtaggaaatgacaatcaggatgttcaggtatttacttcctttgatctgtacgctccgcagcacgtaggccatggccagccccagaacggcagccaccacggtggatacaatggtgaccttaaagctgtttaccagggtgctccagtagtattttcttgcgaagaatttagtaaaataggcaaagcttaagtttccgtcctcagaaagaacgcttttatagagcaccagcaccagggggtagaccacgaagagaaggaacagggccaggattcccagtgccattgcaacccatatatttaattttttctctcctgcatatctcatgaatggtccctcctgacaataaggctttgactgccgtcctcagtgaacacgttgattttatggggctgtacgcccaggcggatgggggtgtggtccgggatgatatcccagatatcggagttctgtatgacctccatctccctgccgtccgctgtttccacaaagtagtgggtggtgatgccgaggaacacgctgcttcgcacaaccgcaggtatgccgccgctgtcctcccggctgatgatgaattcttcaggacggatggataccttcacggcctggccgtcctgcgcgctgcgggaaaggttctccatgggcacgctgtaatccccgatgtgaagcagtgtctgcccgtcccttgcctcaatgcgcccgtccatgatgttggacagtccgatgaaggtggaaacaaagatattggagggccgctggtacacgttcttgggggtgtcaatctgctggatgacgccgccgttcatgactgcgatgcggtccgatacagccagggcctcctcctggtcatgggtcacatatatggtggtgatgcccacctgctgctggatccgcttgatggcgtttctcatctccaccctcagcttggcgtccaggttggacaggggttcgtccataagcagcacctccgggtggatgacaatggctctggccagggccacacgctgctgctggccgccggacagcttggagggcatccgctttttcaggtggtcaatctttactactttaaggatttcgtccacctgggactcaatctggtcctggggtaccttgcggttcttaaggccgaaggccacattgtcccggaccgacatgtgggggaaaatggcgtagttctggaataccatgcccatatttctcttattggtggggatgttgttgatgaccttgccgtcaatcttgatttcgccgccctcaatggaattgaatcctataatcatgcgcagcagagtggttttgccgcatccggaaggccctaagagggtgaagaattcaccgggccttacgtctaaggacaggccgttaataatggtgtcctttccgaaccgtttgattacattttctatgctgatagctacactcatggtttgtaaccctccttgttttttggtttttcagataaaaaggactgcctcagctgaccgtttcagacccccaagaggtgatgggcggtgatggaatcatgtggtcagcgtaatgggcagtcctttgggggcatggttatgccggtgctgtgtgttctgtcagatgagcgggcaaagggttagtccatggatgtctccatatgctcgctgaagaggttggtaatttccgttttgtgctcagcaacccagccctcgtcgtagttatcaaacagtttgatttcagactggggcgtcatgtagtcagccagcttggcatcctttctgagaggccttacagtcaggttggagcccactgcgttctgaatcttctcggagagcatatagtccacaaatttctttgcattttcaggatgcttgcagtcctttaaaatctgtacggactcgccggggaatatggccccttctttggggaataccacctcaaccgcagcgccttcctttacatagttggcagccgggtcttcccaggtcaggcccaccacatactcgccttcggcaacgcccttgtatacctggctggagctgttggccatcttgccgtccaggtttgcgatgaactggtctacataggcccatgcctcgtcagataacgggtctccgtcctttcccatgccgtagagcatggctaacagggactggaacgcggagctggagtttacaggatccccgaatgcaatcttgccctttaactcagggtttaataaatcctcaaagccttcaatcttcatgtcgccctttaagtccttattgacaatcatgaccgtcgggtccgcaaatgcaggagtgaaataaccggtggtgttgcggaacgcatccagcatgttttcatcctcaggcgatacatattccataaacagatccttggaggcggagagcatggtctggtcagccacccagaatatatcgcccagggggttatccttttcagactgggccctctttaacagctctccggtacctgccactaccacctccaccttgattcccgtatccttttcaaactcaggaatcacggcattgttgagggcctcgcttctggccgtgtagactaccagaaccggctcctcttcaccggaagcagcgtccttggctgcctctgtcttagcagcgtcaccagccgcctctgtcttggctgcctctgtgccggaaggctgctgggtgtcgctggtctttgctccgccggagctgcagccggtggctgccagggctgctgccatgatgactgcggttgctttttgaaattttctcatatgaacattcctcccttaaacatatttttttgctgcaccacatttttcataacttaattttagcatttgggctgggaaagtaaatccgacaatcccacaaaaaggtggaaaataaacaacagacggagtgaaaattcagaaatttcaacccgtctgttacaatatggttttaattaattcgctgtcagctgatttaccgggggtttcccggacaggagacactattgccctgtatgattcttggaatatagatggcctccctgttaagaagttggttttcactctgaatccgttccagaagcatctggccaattctgaaccctaaagcccaggtgtcaggcagggcataggtcggctggacatagaacaggtcgcacaggtttacattacatggagctacaatggacagggtctcaggaatggggatgttgtgatcgcggcagtatctcagggcaccgatgcaggtttcattatgggcagccaccaaggcagtaggcgggtgggggagccttaaaaattgttccaaggcttcatatccaaaggcagagtcatgggggccttccagaaagtaacgataatccctgtccaccgtaatgtgtatggaggccatggcgcgcttaaactgctgaagccgttcagcggcagagctgaactgggtggggccgcatatgatgcctatttttgtatgacggtttcgtatcagctccatggtcatctcgtaagtgctgatgccgaagtctgcattggcaaaatccccgacaaatccgggatgatcaatccgacggtgtatcaggacagtgggtattttctggcttaagcttacaatcagttcattgttgccaccgcagctgtttaggacaagtccgtcaattttgcgttctgagagcatcatcagataattgcgttcaatctcactgttattaaatgagttgcagatgaaaagagtatagccctcctcctggattgcatgtatgatggcttgggcaatctggaagtaatattcgtttgtaccatctgcaatcaccagggcgatggtctttgagcttttattttttaattcgcgggcagcctgactgggatggtaacccagttcttcgataacccttaatatggtgctgcgtacttccggcgacactttggggctgttgttcaatacccgtgagacagtggcggtggatactccggattgttttgctatatcccggatggtaatttttgccataagaaactccttcaaactatgctgctgtaatggaagatacccgaacgggccgggggggatcctcttttcttattatacttgatgtggcagaggaacgcaatgaaaaatatgccaaatgtgtaatcaattacacaaaatgttattatgcataaaaaataggataaataatgtataaaatgcataaaaatataactttcaatataaataaattgacatatacgataaaatatattatcattagtcgtgtaaacgattacacgaagcgcgatgtgaaccaggggaagaacatcagaatatggaggtatttttatgaagaaaatgttagcagtaacattggccgtgttaatggcggggatagtggccggatgcggcactaagacagaatcatctgcggcggcagaaactgaaacggctgctgtaaaatcagaagcttccgatacggaacaggcccaagagagccaggagccatccgcttccggtgaccccatccgtattggcctgacaacagttctcacgggggatcgttcgctggaaggagaatatgcctccaatgcggcaaaaatcataaccgaggaaatcaacactcagggaggcgttctggggcgtcccattgaaattgtgattgaggatgctttgggaacggatgtgggtgctgtaaacgcttaccgtaagctggcttcggatgacagtattgtggctattgtgggtccggacagttccaatgacggtatggcacagtcgcccagcgcactggaatttaagatactgaccacggctcagggttcttcccccactttgaagaacatgtgtaataatgataatccgtatttgttccagttaagagcctgcgacgatacgctttgcgctgccctgattaaatattcggtggaagagctgggaattaagagttatgcggttatgcatgacacagagacttcttctgcggatcaggcaagactgttcacagaggcccttaaatcctacggtatagaaccggtggtaaccgtaccctttacgacagggacaaaggacttttcttcccatatcgcacaggtacaggcatcaggcgctgatgcaatcatcggggccgcgttccagacggaagccgctattttgattcagcagatccgctcccttggaatagaagctcctatactgggctccaacggatttgcagaccctgtgaccatccagctggccggggaattaaatgacaatgtatattgcgcaagcgcatgggtaccgaatacaccgaatccaaagggtgctgcgctggctgaaaagtataaggagctttacggcgatgactgcggaaaggcggcagcccagatatacgaccatatatccgtaatctgcgaagccatcacgttggccggttccacggacagagaagcggtcagggaagctatgaataccattggcgattatcagggagccattacgaaatatgactgccggacaaacggtgactgcggacgaggcggactgcttgtaaaggttgtaaaaggcaaggcggaaattatttcggaaatcacctcggaaaaagtcattgagtaaatacggtgtgaacagagaaaacgtggtgagtattgtggaggggaggaatcaggtgcatgaatgttcagttacttgtggcaggtgtttccatgggaatcatatacggtttgatagccataggaatggtgctgattttccggtctgtgggcgtcatgaattttgcgcagggtgagtttttgatgtttggggggtatttttgttatacatttaataaaatactgaaccttccaatcgtactttcgctggtgctggcatccctcagcatgggggtggtaggcattctgttcatgaggacctcctattggcccctgcgcagtgcccaggcaaaggcaattatcgtcagcgcaatgggggcgtccattgtatttaaggaaggggccaggcttatatgggggtccattcctgtgacaatggaccgggtgattcagggaaccgcccatctgggccaggcaacgatacagtggcagaatgtggcaatcattgccatctctgcaatcataatggctctggtatatatgcttctggaaaagacatttgtgggtaatattatgcaggcaacggctcaggaccagtatatggcatcactgacaggagtacctgtgattgtgtccataggcctgacgttcgccctgtcagccatgattaccggaatcgggggaggactgctggcgcctattttcttccttaataatacaatgggagccaccgccggcgccaaggcttttgccgctattgtcataggcggcttcggcagcgtacccggagctgtgttggggggattgatcgtagggctggtggaggcctttggaggagcttatatatccagtacgtatcagctggtactgatttacgtggtattgattgcggttctgatgttccggccccaggggatatttggtgaaaaaatccaggagaaagcgtaggtgacttatatgttggaaggaatcagatcagttaagaaaccttatattcttacattgatggccattggcctgggatgcagcatactgcctgcggtttcatccagttatatgatgagggtgtttaatataactctgattacatatctttgtgtgttgagcgtatatgtgcttttggggctctgcggacagaactcctttgctcaggccggtctgtggggcgtaggcgcatatattacagccaacatggtccttaagctggggctgggatcggctgccgccttcatcattgctaccacgggtaccgctgcgttcgcctttatactggggtttgcgtttttcaggctaaagcagtattattttacctttgcatcagtgggcctgatgacgattctgaatggactttttatgaactgggtgcctgtgacgggaggtgccctgggaatatcagacatccctgttttctctattgcaggctttgccgccaatacggagaatcgtaagttttttttgatactgattgtctgcatgctggccagtctgggtatcagaatcctgtttcattcccctctgggacggtcattcatggccatacgtgataacgagatggcggccaactgtctggggattaacagtcttttgacaaaaagcattgcattcgcgatttcaggcgccctgtgcggggcggcaggagcaatgtatgcgttcctttcggggtatttgagctaccagacatttacgtatcagcagtctaccatgtatttaattatgatcatgcttggaggcaccatgtctccggtgggggcaatcatcggtaccctgatcatttccctgctgcaggaatgggtacggcccttacagaattatatgcagtttatctatggcacaggaatcatgatcttgatgattgtccagccggagggaatcatagggggagggaaagagttctatgccagatacattaaaggaagaacaggccgttttacggttagataatgtcagcaagaatttcggcggggtagttgccgcctctgatatatgcattcagcttttcagaggggaggtatttggcctgattggaccaaacggggcaggcaagaccactcttcttaacctgattaccggtatttatatggcggacgggggagacatatatctggacggaggaaagataaccaggtttgccacccaccgacgggctaaaatgggtatagccagaacgttccagcatccaaggcttcttaaccggtgcgatatcaggaccaatatctttatgggagtggacctggcggccaggagaagggggaaaaataaaaatgtggagcaggagctggcccagcttcttgcctgtgccggccttgatggagtggaccttacggaccaggtagaccagctggcctatggacagcagaagatgttggaaatcgtacgggccattctatgcgaaccggtggtgctccttctggatgaacccgcggcagggctgaaccacaaggagatggactatatcgtggccctgattgataaggcggtggagaagaagattgcagtacttttgattgagcacgccatggatttggtgatgtcggtttgcgacagaattacagtacttaatttcggatgccagattgccacgggaaccccaaaggagattcagatgaacgaggcagtgataacggcatatctgggaggtggaggcagtgctgaaaattgagaatctgattgctaattacgggagaatagaagcccttcatggaatcagcctggaggtaagggaacatgaaatagttgccttgattggaagcaacggtgctgggaaaaccacgcttctcaattcggtctcgggtcatgtcacaaaagaggggaaaattgaactggcaggagaaaatatcagcaagctggcgcctgataaaattgccaggaaaggcgtgcttcatgtgcctgaagggagacatgtatttcctggtcttacggtagaacagaatctcctggtgggaactgcggctaataaaggagtccgcctgtccgcaggtaataataagggagatctggactatgtttacgatatatttccgagacttttggaacgcaggaagcagctggcctggtccctctccggaggagaacagcagatgttagctatcggtcgggcaattatgggtcatccaagactgcttatgttagatgagccgtccatggggctggcccctctggtgattgatgagctgtttgagaagattgtagagataaataaatcgggaacaccggtactactggtggaacaaaatgcaaagctggcccttaaggtgtctgacagggcgtatatactggaacgcgggaatatatcactgtccggaaaatcaaaggatttgataaatgataagcgtgtaacggaggcgtatttgggtaaatccagataggggccgcataatttggaaggagaaatggaatatggtaatttcggtgggaagtgatcatgccggttatggactgaaggtaaagatgattccgtatctggaatcactgggacatacaatcatcgacaacgggaacaatggagcggaggatgtggtcttttttccggaggtggcaagggctgtgtgccggccggttcttgaagggaaggcggaacgcggtattatgttttgcggaaccggagtgggtgcttcggttgcgtgcaacaaaatacccggaatcagggcgtccattgtccatgattaccagtgtgcccatcaatgtgtggagcacgatcatgtaaatgtgatgtgcattggcgaaaaggtggtgggagagtggctggcgaaggatcttctgaaggcatttttggaggcggcaggcgatacagacgaaaggacagcccatgtaattcagctattggcacagatggaccagagacagtaaggagaggcaatggaaaagagatacatatttgacgcggatacacatgtttcgccttatagtaattttgataaaagcataaatgcctgtcagtgggaagaacggatggaacgcgccggggtggctcatgccattgtctggctgctgccgcagggagtggtggatgtgacggagagcaaccggtatataggaagggaggcacagaaaaacaagagaatggttccctttggctgggccaatatacgggaaggggctgaaaaagccagggaagatgcccggttatgcctggaggagtatgggtgcgcgggcgtaaagctgaacggggcgcagaatgagtattatatagactgtccggaagccatgtctgtcatggaagtagttgcggcccgcaatggtatgatagcgtttcatatcggagcggactatcctgattttacggatcctatccgggcagagcgggcagccagggcatttccggacactaagtttcttatggtgcatatgggaggggcaggtgaacctgatgtgagccaaagggttatcgaaacagcggcccgtaatcccaatatgtatctggtgggaagcgccatacctgcagccaaagtaaaggcggccattgatacgctgggacctgacagaatcctgtttggttcagacacgccattttatgatgcggcagatgtaattagggaatatgacaggatgctttccgggtatgatgaagaagtgagaagaaaaatcatgggagagaatgccggaaggctttttggacttccagtgcagagcgtgtgacgtgcgcaggggtggatgcagacagaccagcatccacccctgttccttgtgttgggagaatatattttacttgttcttcttgccttccttcccctttttcccctcttttccttccttggccgcctttttatcgcccttttttgatttcgcggatttcttgggttcagacttctttggcttatcgcctttgggggagtcggattttctggatttggaggatgtctccttttccgcggaaccggcttcggggacagaaggttcctccggggcgggactcccttccgggatgtactctatgatatcgctgatatcacagcccagcagtgtgcagagggtatccagggtgtgggtggatacatgcatgttttttttcagccgtcctatctggcccgcgctgaaattataatgtttgatcagtctgtactgagtcatgccctgggcttccatggttgcccacagccggtcatagcgtatcatggcttatcctccttttggctgttaaagtccgtaaaaccgggcttttcagtggctattatcaataaatggattataccatgaagcgggtataaatacaaggaggattggcagaaatgggaataaaagagagaagaatgggaatagtaggaatgaccatatgtcacactgttttcatatataattaggaggaaaatccatgactgattttaagaccagcgagacagctaagaatcttatgagagcctttgcgggagagagccaggccaggaaccgttatacctttgcggcggggctggcaaaggagcagaagatgcccatggtggaggcggtattccgctacaccgcagaccaggaaaaggaacatgcggaaatattttatgactatctgaagccgttagataaggaaaccatattcatagacggaggttatccggtggatttggaaaagaataccctggcccagctgaatgcggccgcacacaacgaatacgaggagcatgacgtggtgtacaaatcctttggagacattgcgcagaaggaaggcttttcccagattgcagccaccttccgcatgattgcggagattgagaagacccacggtgagcgtttccagtatctggcagatttgctgggagccgggaacctgtatgtgagccctcagaaggaaacctggatctgcaccaactgcggatatatatatgaaggagaagaaccccctcagtactgtcctgtatgccgtcacgaccagggctattttgcccgcaaggagctggcgccgtggtatctgcaggataatatgcagaagaataagcagacaaagtagcccacagacaaaataagattttacaaagagggtgagagggtggtataatgtccacgcaggcaaagcccggggccctgaaggaacacagccaaatcagggccggccgcgctttgcaaatgagactgaaaactgattaccacctattaaggagaacagatatatgccaaatccaattcaagcagtcatattcgaccaggacggacttatgtttgacacggaaagcctggccgccacatcctggtttgaagtaggacctaaatacggaatccatgtggacggcaatttcctgcggggaatccggggatgcaaacctgacaaggtaaaacaggtctgcacacagcagttcggtgaggaggccatgaaggactatgacaggttccgggaagagaagcgccaatactcctaccgctggattgcggagcatggcgtcccggtaaaaaagggccttaaggaactgcttatatacctgaaagaccacaacataaagacagccgtggccacggccagcagtgaaagctggacccagggcaatgtcaggggagccggcgtggagaagtattttgacgattacatatacggggacatggtgaaggaagcaaagccaaacccggccatcttcctgctggcagcccggcggctgggggtggatcccggggcatgcgttgtcctggaagacagctttaacggaatcaaggcagccgcagcaggcggttttaatccagtgatgatacctgaccaggaccagccggatgaagaaatccggaaactgctgaccgcctgctgtgacagtcttacagatgtcatcggcctctttgagaacggcagtctgtcattaaagcagccatagcagccccggaaaagaagctgtcatctaataaaggaatgaattatatgtggaaagaagccgtttccctggccgcagcggcaggcgctgcctgtatgctgcggtccgagtacgaaaaaaagcatttttcagtggaagtgacagagatcatttcccctaaactggaaagggacaggaacctgatattcctgtccgaccttcacaataacgagtttggccgggacaacggggaactggtggcagcgattcaccgtctgaatccggacgcggtattatccggcggagatatgatggtctgcaagggaaagcgggacataaaggtcccgctgaagctgttccgccagctggcagccagctatccggtttactgcggcaacggaaaccatgagaaccgcatggtgtgggagcgcagcttatacggggacctctacgaggagtacagggatgccatgaccgccatgggcgtcagctacctggaggacagctgtgcttttctgggaagggacttaaggattgccggtctggatttagccccctgtttctaccggaaggccctgtaccagaaggtgccgcccatgcccccgggctatctggaacggaaactgggcaaaggaccgtctgactgcaaggaggagcccttcaccattcttctggcccattcccctctgtattttgattcctatgcccgatggggagcggatttgactctggccggacattttcacggaggcaccatccgcataccgggactggggggagtcatgacgccccagtaccagtttttcttaccctggtgcgccggggattttgagcgggacgggaagcggatgattgtcagccggggactgggaacccactctattaatatccgcctgaacaacaggccccagctggtgctaatccgtttgagaagggcgtgacaggcataaaaaaccataaaatgaatgccacttacaggtgaaagaatggaaaccatatcctataagctggagcattttgaaggtcccttggatctgctgctccacctcattgagaaaaataagataaacatatatgatattcccattgtggaaatcacggcccagtacctggactatgtgcgccatatggagcgggaggacttaaatattgtcagcgagttcctggtgatggcggccacgctgcttgacattaaggctaagatgctccttcccaaggaagtggatgaggaaggggaggaaatagaccccagggcagagctggttatgcgcttactggaatataagaagtacaggctgatggccgatgaactggctgacagggaggatggggctctaaagcatctctataagccctccaccctgccgccggaggttgccaaatatgagcctccggtggacctggacaagctccttgacggacttacgctggctaagctccagagaatctttgagcaggtaatgaagcgcaaggaggacaagattgaccctatccggagcaatttcggaaccatacacagggaacccgtaagcctggaacagaagataggaaacgtgcttctttacgccaggaggaagcgcagattcagcttcagggaacttctggagggacagccggacaagctggaggtggtggttaccttcctggcggttttggagcttatgaagataggaaagattcatttgagccaggaggagacctttggggacatggacatagagaccctggagcaggaaggcgaggaagaggagctggatttggcccaactgggtgattttgaaggatgatggatggaatcttatgagtagtaaagacagaatagaagccctggaggccggagccggcgtggttgaaacccgcaccggaaagctggccggaagtgagaaaagagaagcaaaggagcaggaagggcagatggagcttgcctttcctcctacagaggatgaaaaagagcaggaggcggttatagaggcagtgctctttaccatgggaaggtcggtggagcttcgccagctggcggcatccatcggccagccggaagaagtggccaggaaggcagtggagcgcctgataaagcggtacaggtcagccagaagcggcatggagataacccagctggaggacagctaccagatgtgtaccaaggcagcctactacgaaaacctgatacgggtggcctctgcccccaaaaaacaggtgctgacggaagtggtgcttgagaccctgtccatcattgcctataagcagcctgtgaccaagatggagattgagaagatacgaggcgtcaagtcagaccacgcggtgaaccgtctggtggaatacaacctggtatacgaggtgggccgcctggacgcgcccggccggccggctctttttgccaccacagaggaatttctgcgcaggttcggcgtgggatcggtccaggatttgccggatttgggtcctgagcaggaagcggagatcaaggcggaggtggaggaggagctgcagcttaagctggaggaactgacggttgaggctgcatctggggaagccgctgagacggccgagaccgccatggaagccgccgcgacggctgaggaaaccgccgtggcccgggaaccggaagcctgatgccccgtgtttgtacacagaggagattcccaaagcagtacatgaggaatatactaaaataaaaagaaaaagttgatatcatgcttggaagtctgattttagtatttgctctctgtacagatacctttgtggccagccttgcatatggagccaaccgggtccatgtgggctggggaaaggtagctttgttaaacggtatatgcagcggatgcctggggctggccctggggctgggaaacgttataagctctgtccttccgggggatgtgaccaggattatctgctttgtaagcctgtttctgctgggattcatcaagttcctggattacagcattaaggcctatatcaaccgccattgctgtatccgccgtaatctcagcttttccctgtctggactgaaggtcatagtcaatatttacggagaccccatggcggcggacgtggacggctcccagtcccttggatggaaggagaccgtattcctggctctggccatgtccattgacagcctggtggccggaaccatggcagccctgcttgatattcctgtggccgcaaccctggcactgtcatttgccgtgggagtatgtatgatgtacggcggcctgtggctggggcgcaaggtggcctcacgcttccggtgcgacctgtcctggattagcggcgtcctgctgatggtcctggctttgatgaaggtccttcattgatggggggatggctgaaaatgttcttggaccgtgccttatggtatggcttatcctgatggactgccaatttatggatatttttcatccccttaccagtgagaacgaccgtaagaaaaacaggtaagaaaaacaaaaaacaaaatttatgcgcaaaaaaacataacaaacacgaaaaaaagcagcccagccggcgtaagggagttccgatacgctggtccggggctgcttttaaccgccgttttaccgctatatatcttttgccttggctgacagtccttccatgtaggcttccgcctttgatttatccagagggtccaatttatcatacaggtccataatccgcctctgctgttcgttcagggtaacctgtatgccgtcggtgctgtagaactgggccatggttatccccatgacttcgcagatacgccgtatggtcggtatactgggaaccgtggtacgtctgaacaggttgcctatattattgggggaagtatccatctccagtgccaggcggtaatgactccatccccgctctctgcaaagctcttctatgcgctccagctcataactcatcatgtttttcaccaccatagtctattatctacaaaatcttttgtattattgtatcccagaggtgaaaaaaacattaggctgaaatgtagtagtgggggaattcactatataatgcataaatacacgtacaatgcattgctataccagacggccgccatcaccatatcccagcagatcgttaggggtgatgcggaaataatcgcaaagtatcttaagttcaatgtccgtcacaagacgtttgcccttctctattctgagtatggtcagttcgctgaaataatagccctgcacctgtagctgggcagccatttccttctgggatagttttctgcttttgcgcagcttgaaaatctggttgccaatgagatttctctgcggctgggaattgtaggaaattttcatagatgtccctctgttcggtgtaatacttctaaaagtgaagttcctatatgattgtaatgaatatgaatatatcaaagtttctaataaagaaggaataaaaaataaagtagaaaattccataggagtatgatagacttgtaaaagtgccacagttcagacggcgtatcttcttgactgaaagaaacggacaggcagtatcggatggactgttacgtaaaagtatgaaagagacaggagaaaattatgcagagaattgcgaaatttcataaagttagttttgaacagtttaaggcagattgggctgatgctttcccggatacatcggaggaagacataatacatatttatgaaggaatccggcttccggccagggccacttccggctccgctggatatgatttctttactccggttccccttaccctggcccctggtgagagcatgaaggtccccaccggcgtcagggcggagattgacactggctgggtgctccagatttttccgcgcagcagcctgggatttaaattcaggctccagctgaacaacacggtgggaatcattgacagcgattatttttattcagacaatgaaggccatatgttcattaaggtgaccaatgattccagggagggaaagactgtggagctgggacagggcgccggatttgcacagggaattttcattccttacggcatcaccgcggacgacgaatgcagtgatgtgcgcaacggcggttttggaagtacggatgcaaggtaggtagaaacatatgggaagtcgtggacagaggtcatacagcagcgggcgcaggccccagtcaaaggggcagcaccccggatacggaggaaaaaggccggtttccaatgcagcgcgcaggcgccgcaggagaaaacggattatcagggcggtcattgcgtgggcagtctgcatctttctcgtggggttgattgcagcgggaacattccggctggtggcgcacatgaccacctccaagaagcgccagttccgtgcagagggtatagagaagctggaggcaggagattatgcaggggctatcggatcctttgatacggctcttgaaaagtctggcaagggagcagaggatttcaaccgggatgtgctcttatacagggcggatgcagagtttctgttaaaggattataatgcggctatccacacctatgaccttcttctggagatgaagccggacacaccggagtatatgtacaggcagagcagctgctatgcccggcttggagatacggataatgcccttgagcgctaccaggaggctaaggcgctggataagaaggacaagccggtgcccggcaggcaggaggccctgctggccgcaggaagcgcctgtgtggacgcgaaggaatacgataaggccatggcgctttatgaagacgcactgaaggatgggatggaacatggtgaaatctataatcaaatgggtctatgccagatggctgcagaggattaccagagtgcttatgattcttttgacaaagggtaccaggtagcggctgctgcccaggctgcggctctacaggagaaagaccggaaaacaggcaaggagacggacaaaaaagaaacgaaggatggggacgccggggaaggggcaggcggggaaaacgcgccggctgtcgcggcagaagcagacggcttcagggaacttttgaaggagctttcgtataaccgggccgctgcctgcgaacacttacagcagtacgacaaagccctggcattatttgaggactttgtaaaggaatttggctccaatgaagatgcggagcatgagattgcatttttgaaaacgaggtaggaatggcggaattaattgatttgagtgaactgcaggaaaaggtaatactggtggcggtgagcactgccgaggaggaggacacgcccgcttccctggatgagctggaagagctggcctccacggcaggggctgtaactgtggccagaatcatccagaaccgggaaagggtacatccgggcacctatctggggaagggtaagatagacgaggtgagagagctattatgggatacccgggccacaggcgttatctgcgatgatgagctgtcaccggcccagctcaggaacctggaggatgctctggacaccaaggtcatggacaggaccatggtcatactggatatctttgcttcacgggccagcacaagagagggcaagattcaggtggagctggcccagttaaaatacagggccgtgcgtctggtgggaatgcgcaattccttgtcccgtctgggaggcggcataggaaccagaggtcccggtgagaaaaagctggaaacagaccgcaggcttatccatcagcgaatcggccagcttaaagaggaactggctgatgtgaagcgccaccgggaggtgaccaggcagcagagagagaagaattttgctctttccgcggcgattgtgggctataccaatgcgggaaagtccaccctgctcaaccgtctgaccggggcgggaatcctggcggaggataagctttttgccaccctggaccccaccaccaggagctataccctggaggatggccagcagatactgcttacagacaccgtgggatttatccgcaagcttccccatcatctgattgaagcctttaagagtacgctggaggaggcgcgctacagcgatatcgtcctccatgtggtggactgctccaatccgcagatggacatgcagatgcacgtggtgaaggagacgctggaggaactggagattgtggataagaccatagtcaccgtgttcaataaggtggaccggttccgtgagctggaggccgggcagaacagcggtgtcatgcagattcccagggatttttcatcagactaccaggtgaggatatcggccaggacaggagagggactggaagaactgcagaaggtgctccaggccattatacgcagcaggcggattctgttggaaaaagtttttccatacagccaggcagggcgtatccagaccatccgcaagtacggtcagcttctggaggaggaataccaggaggatggaatcgcggtaaaggcatatgtgccggcagagctattcggaaagctgtattccgactgaatttaattggaaatataataaaatgccccctgtccgaaaaaccacgcaggtataaggctttgcagggatttggaaaaaagagttataagtacagttaataagacacaatatctgggataatataaaatgttattcatagatattgtgttttgtatttccatctgctataatgggtgcgtagctcgctccacatggagcgggccctgcgttttcacagctgtgaaacagctgtatcattccgggtttaccagacgcggaaaaagggttgaataaagtgtacgtgggttgaaaggagcaagtggtatgattcaggtagttaaaagggatggggaagttgccgagtttagtctgaataagataacagaggccatcaaaaaggcattcagggcaacatccaaagattacaacaatgagattctggagttattatccttaagggtgactgcggattttcagaataagatgaaggatggaaggatttctgtggaagaaatccaggacagcgtggagcatgtccttgaacagaccggatacacagatgtggcaaaggcttacattttatataggaagcagcgggaaaagatacggaacatgaacagcacgatcctggattataaggacgtggtgaacagctatgtaaaggtggaggactggcgcgtaaaggagaattccacggttacctattccgtgggagggctgattctcagcaactccggtgccgtgactgccaactactggctcagtgaaatttacgaccaggagatagcggaggcccaccgcaatgcggacatccacatccacgatttgtccatgctcaccggatactgtgcgggctggtccttaaagcagctccttatggaaggcctgggaggcatcacgggaaagattacctcctcgccggcaaagcatctgtccgtgctctgcaaccagatggtcaacttccttggaatcatgcagaatgaatgggccggagcccaggcattttcttcctttgatacataccttgctccctttgtaaaagcagataatttaagctatccggaggtgaaaaagtgcattgagtcctttatctatggagtgaacacccccagccgctggggcacccaggcacctttctccaacatcaccctggactggactgttccggatgacatggcagagatgaatgccattgtcggcggcagagagacggactttaagtataaagactgcaaaaaagagatggacctgattaacaaggcattcatcgagactatgattgaaggtgatgccaacggacgcgggttccagtaccccatccccacctattccattaccaatgaatttgactggtcagatacagagaacaaccggcttctgtttgagatgacatccaagtacggaacgccctacttctccaactatatcaacagtgatatgcagccaagcgatgtccgcagcatgtgctgccgtctccgtctggacctcagggagctgcgcaagaagacaggcggattcttcggctccggcgagagcaccggttccgtgggcgtggtgaccatcaacatgccaagaatcgcttaccaggccaaggacgaggctgacttctatgcaaggctggaccacatgatggatgtgtctgcccgttccttaaagaccaagcgccaggtcataacaaagcttttgaaccaggggctgtatccctacaccaagagatatctgggcacctttgagaaccatttttccaccatcggtctcataggcatgaacgaggcaggcctcaatgccagatgggtcagaaaggatatgactcacagggagtgccaggagtttaccaagaacgtgctgaaccacatgagggaacgcctgtcggattaccaggagctgtacggcgacctttacaacctggaggctacgccggctgagtccaccacctaccgtctggccaagcatgacaagcagcgctatcccgacattatcactgccggagaagagggggatacgccgtattacaccaacagttcccatcttcccgtggattatacggaggatgtatttgacgctttggacatccaggatgagcttcagaccctgtatacatcaggaactgtgttccacgcgttcctgggcgagaagatgcctgactggaaggccgcggccaatctggtgcgcacggttgctgagaactacaagctgccttactatacattgtcgcctacctattccatctgcaagtgccacggatacttgattggggagcattttacctgtccaatctgcggggagaaggcagaggtctacagccgtattaccggctattaccgtccggtccagaactggaacgaaggcaagacccaggaatacaagaaccgtaccaactacaacataggccaatcccagttaaagcatggcgtgtccagaatcacggcagataccagggagaggacggacattgccagaacagagagttcccatcaggggaaggagaagggaggcgccttgactcacctgtatctctttaccaccaagacctgccccaactgcgtatcggcaaaggagttcttaaagggacaggattaccagattattgatgcggaggagcgtcctgacctggcggaaaaattcggcatcatgcaggcgcctaccctggtgattgtcagtgacggcatcgtgcagaagtttgccaatgcttccaacatccgcaggtttgtggagcagaatcatacaagtacagtaaaggcataaggaccggaagatggatacattgtatatgtttatgggggctctgtgcctggcagagggtatatgtctctttacaggaaaggatttcctcatgtttatgggctccaccaaaaaggaggactacaacctggataaggtgtttcaggtggaaaagtggatattccttgtggatgctgcatgcagcttaggagtgggcatgaaccggtttccggatgtggcggaaaacatactgctggttgtgttcggagtcacattggctgcccatgtgtatgtgtttaagagtaaaaaattccggaaggaaaatgaataagaattcctgataagacatctttggtgagaggatgggattttatcgggaatgatgcggaccgccgctctcagtgattgggagcggcggttttttccgtgcgcccggcggcgcacgtctctaactggtgaaagtccggaattcgcccggtggtgggaaggatatagccgaaggcaggggtgttcatcgtgaggtgaaatctgaaggaagccgga

SEQ ID NO: 3166 - DNA, 7207 bp, Unknown
  gut microbiota DNA sequence
gagaatgatttcggatttatttaaacttaaaaacagctatgtgaaaacactcaggttttcatcatagctgttttaatttacaatactcaattcctatcagcaagctactgacagttcggattttcttatttagctgcttctgtcggtgttgcttccggtgtttcagtagtttctgctgcttcttcctctgccgcaggtgtctcagtcacatctgtatcttctgctgcaggtgtttctgtaacttcctctgtttccggtgttggagttgcctcttctgtcacttcaggtgtcggtgtttccggaaccggagtaggagtcggcgccatgaaggtatgtttgtcagtgatcttaagtgtcttaaggactttcttaaccgcctttacatctgcctcatccagccatttggcagttgtatctgtaaaataggtattttctttggaattctgaagagattctcgcttggaagctgtggcatcttcatcattgatcttgtcaagtcttactacatagtatcctgtgtcagtctcaataatattgtctgcaacttctccatccttcagtcctctcagaaccttcagaacctcatccggatatgcctcgctgccggaatcttcatcctcgtcttcgctctcttttgttgtaaaattaccctgtactgcagaataactgtcatctacacctttggcaatctcactcatgtctgctgtaggatcctctttcatcttatccagaatctcctgagcctgttctttcttagtctttttctcctcatcagttatatcatcaccgcttgtagagatacttacataagtgaaggttgtctgattcgcttcatcatcagaaactgtgatctttccttctgctacaaccggatcatacatcttcttctgaattgtctgaagctccagaagtgtttttacctgatcttccgttaccgcaagttccttaattgtctcttcactgtttgcagccataaactgtgatgctgcatctgcgatcgctgcttcatcatcatctgtaagctctacgttataatccgcagccttctctttgagaatatacatcttctcaacagactccagactgcttgtcactgcctgatcaccataagtctcatctgaatcatcacctgctgtctgatcccagatattatctgcacttcccatataatttaaatacatggttgttgtctgctgttgttgttcgcgggcataaagacttacaactccaagcggaatatctgttccgtcaacagtagccactgtctttgttccatctaatgttttacttccacagccggaaagcataccaactgacatcacacctgccagtgtcacaacggctgttctctttaccatttttttcatttcttcctccatattatcaatctggtctttcttccataccactttcccagaatgtactgttattagagtataaacttttttcctgcgaagggcaaggcaaatcgaaaaatatgtagtatatttcacatattttccgccatgctcttaagttcctctgcaaattccgtcaatgccaggatcagattcccctgtggttccaggataaatttcggttcctgctcattcttaaactgcagacctcttctgtatttctgcataagagccggaaagccttctgtattcagccttgctttctcataaagggtaaaccggactgtttttccagtctgctttatttccgttacgtacccctgatgagcaatcgcctttaacttcgcaatcgccagaagattcagcactgcctttccgggttctccgaaacggtccagaagttcttccagcatatcatcataatcctgttgtgtctcaatccccgcaattcttttataaatatccagcttctgaaattcattactgatgtaggaatcaggaatatacgcatcaacattcagatcaaccgatgtctcgaaatcctccattgtatgaatacccttcgcctctttcactgcttcattgagcatcttacaataaagatcatatccaaccgcattcatatgtccatgttgctgcgcacccagcagatttccggcacctcgaagttccagatctctcattgcaatcttaaatccgcttcccagatccgtatactcgcggatcgcagccagacgcttctcagccgtctccttcagcatcacattctttctgtacatcagaaacgcataggcagttctgttggaacgcccgatccttccccgaagctgataaagctgagaaagcccgtatctgtctgaatcatggataatcatagtatttacattggaaatatccagccctgtctcaatgatcgtggtggaaaccagcacatcaatatccccgtttacaaaggaatacatcacattctccagttccctctcactcatctggccatgagcaaaatccacccttgcatccggcaccagcttcgcaatacgcagggcaacatctgcaatatccgtcactcgattataaacataataaacctgtccgcctctgcgcaattccctgttgatagcctctcggaccgtctcttcatcatattccataacatatgtctggatcggcattctgtccataggaggctcctccaggacactcatatcccggattccgatcaggctcatatgaagagtacggggaatgggcgttgcagtcagtgtaaggacatccacatccttctttaactgcttgattttttccttatgcgtaactccaaaccgctgttcctcatcaacgatcaacaggccaagatttttgaactgtacgtctttggaaaggattctgtgcgttccaatgatcacatccacctgaccttttttcagatcttcgattgccttcttctgttgtgccggggtccggaatctgcacaacagttccacacgtaccggaaattccttcatccgctgcacaaaggtattataaatctgctgcgcaaggatcgttgtaggtgcaagataagctacctgtctgctctcctgtacttccttaaatgcggcacgcagcgccacttctgttttgccgtatcccacatccccgcagataagccggtccataatcctggtactctccatatcacgtttggcatcctcaatagcactgagctgatcctctgtctcttcatatggaaacatttcttcaaattctctctgccatacagtatcaggaccacagacatatccttccttttcctgacgcactgcataaagctctaccagttcttttgcaatatttttaactgccccacgaaccttgctctttgttttattccactcctgagtaccaagtttgttcagcttcggagcctttgaagcatctgcccctgaatatttctgcagacagtcaagctgagtagcaggaatatagagattgcttccgcctctgtattcaattttaatataatctttaacgatcctgtctacttcaactttttcaattcctcggtaaataccaagaccatgcttttcatggacaacaaaatcgccgatagaaagctccgcaaaatcctgaatacggcttccactgtaattttttttcttcttttttttctgttcctgtccaaaaatgtcagattctgtcattaccgcaaacttgatcaacgggtattcaaagcccttctttgcctggccataaaccaccatgatctcgcccggacagatctccctgtcataatcttgtccataaaaggctgccagtccctcttcctgaagatcctttgccagcctctcggcccttgtgcgggaaccggaaagcagcgcgatcctgtatccctgtttcttatactgatgaagatcttttaccagaagttcaaaactgttgttataagcgctgattgattttacctccaggtaaaatttctcccgcactttccagcctgcctgtttcggttccagcgcacatacagaaatacagttgcgtttattcagttctttttgaagctgttcaaaagaacaaagccagttttccggcagattccggctgcctttttcctctctgtgcatacggctctgtctgtactcttcttctacagccccgcctttctcagtcagtcggtttggttcatccagaaagattatggttctttcctccggaaaataatccaggaaggaaaccatatccttgtcccctatatgctccaccgccggatagattgtaagttcttccagattttccagagaacgctgactctccggatcaaaactccggatagaatcaatctcatctccccaaagctcgattctccatggattttcctcagtgagacagtaaatatccacaataccgccacgcacagagaactgccccggcatttccacctgtcctacccgctcgtaacctaaagccaccagctggttcttcagctgttctatgtctacggtgctgtcactttcgtaatgaatcagctgttcttttatcttttccagagattccagaaaatccatacatccgtcaatacttgtaacaactgtcaattctttctcttccagtaacgccttaatgaccttcatcctctgacgtatcagcagatttccatggatatctgcctgaaagaacagaagatctttcgcaggataagaatacacttttctgtcataaaatctgtaatcttcataaatttctctggcgcagcgttcgtcctccgccaggatcagacgataaggcgcaatcccggaaagtccgtacatcagatgagatttctgcgattccatacaccccgaaacctgcaggattcccttattcgttttgcttttttctttaatctgttcaaactctgcaagcccctgcagaggtgttaaaaatgctttcatcttcacccctcatgatccttcgacgtaataaaagcggcttctgtttccagttaccgctttctataccttttgctgaacaatcatctatttcctgtctgcttatttctgtacaggtactcttctgttatattcgttcatggctgcatctgtaccctgtgagattatgatatccacagcctttgccgcctttgctattgcttcatccacaaatttcctgtcttctgtggaaaatctgccaagtacatgatctgccagatcccatcccttcggctttgcaccaactcctactttgatacggagaaatttctctgtgccaagctggcggataatatctttgatcccgttatgtccacccgcacttccctgcttgcggatgcgaagctgcccgggttccagatcaatatcatcataaataacaataagctctgattccggatcaattttaaaataattcgccatctcacgaacaggaccgccactcaggttcataaaagaaagcggcttcataagaatcactttctctccgccgatcatggttttaccgtacatggcattaaatttcacaccaccctgagggacattgtaatcctctaccagacggtcaacggtatcaaatcccatattgtggcgtgttgcttcatactgtttcccgggatttcccaggccaactactaaatacatatatgtgtctcctgcttaatttaacaccattttccggaattaccatacctgtcctgatgtcaaatttatttttttacatcctctaaagtgtgttcaaaaaccaatcctgcaaattgtaacgcacgtcttgcggaaagcatttttcaaacacacgctaagataattaattaaaatataccatctcttccttaagcggctcgcattctttcacatcacttgcataaagaacaatgccctcaccccgatattctgtacggttctcaaatgcgaccttcgctgttacttctacccagctgccctctttgatatgcggtgcataatcgcttctgcacacgtatccaaggaaagtggtatcatctgcgcagcaggtcattgccacacgtcccggaacaaagaatttacttcccattccacgtggtttcatgacacgtcctttaaagcggacaattttgtctacatatttatccggattatccatggcatccacaaaccagataccataatcttccggtggaatctcaatgatcggtgcattgatatcaaacggcatctcgtcctggaaaatgtcatccatctcgccctcttcattttcaaagataacctctgcactctgatttgcgaccttgatccctcgtctgtatgcaggaagcggatctccctctttacagcggttaaatacaaccatatctgtatttctgatcatatccatgaacagagatttcatgtttgccatataaacctgataagtagttgcatccacacaggtaatctcctgctcaatgccccagccttccggaagctccatctgctcaaacttacttacaagccacattccgttgtactcgatcacaacacgctccggctgatggatgatatccatggcagccagacgctgtggtgtcagatcttcttgatcctcgatcacttccacaactgtgtttgtaagtttcagtttatccatatcatattcttcttcgccttcttcgcaaaggatcaacagagttttgccgtcaatggcaaaatactcctgctgcaatgtaaaatccaggaaagtagtctttccgctttccaggaatcccgtaaccaaataaatgggaactctgatatcatccatcatataatttattcctttatctttattctgattctgttattatctgccgaaatcattcagtcgcgcatctatgacgaggatttcacactctgatgagctgaatccagatgcagtattttagaggattgccataaatcgctgtttcctcatgatcattatgcaagcccaaataattctgcaagtttatcttctttcagtttggagccgatcacgcagagacggcctgtgtattccggtgcaccttcacggatttctgtttcctccggaaccatgtcaaaataaatccatgttccgtcttctgcaggaagcattccctttgcacgaagaataataccgtaatcttcagaagcggaaagagcctcaagcatcttctcaagaccttctcttgtgtatttcctgatcgtctcacgtccccagcttgtaaatacctcatctgcgtgatgatggtgatgatcatgatgatcatgtccgcaaccgcattcatggtcgtgatcgtggtgatgatgctcatgttcctcatgatcatgtccacagccgcattcatggtcgtggtcatggtgatgatgttcatgttcttcgtgatcatgtccacagccacattcatg

SEQ ID NO: 3167 - DNA, 549 bp, Unknown
  gut microbiota DNA sequence
ttttttacaaatagccagggaggagagaggtaacaatatgacaaatcagaatgagtacctaaaaagtacaaagctaatcacggcccattatggagaagagtacgagcattattacaatgctatcgttcccccggtattcatgaattccctcaatgtatttgagacgcttgaggattattacgactttgaccggacagacaagcacaaatattgctatgggagggtgcagaatcctacggtgcgcatactggaggacaagatagcggctctggagcacggcgtgggagccctggcttttgcgtccggtatggcggctgccaccacggcagtccttacagcctgcaaggcaggcagccatgtggtatgccttcacaatgcatacgggcctttaaaggacttcctcagcaaatactgtacggagcacttggacattacccttacgtatgtcaccggtgacagtgtggaggaatttgaggaggctgtgacagatgccacggacctgattgtgttggagagcccgtcctctgtgctgttttcccttcaggacat

SEQ ID NO: 3168 - DNA, 2984 bp, Unknown
  gut microbiota DNA sequence
gaccggcgccagtgtggaggaatttgaggcggctgtgacagatgccacggacctgattgtgttggagagcccgtcctctgtgctgttttcccttcaggacatacgggccgtgtcccgcattgccaggaaacaccaggcgctggtatacatagacaatacgttctgtaccccgatctaccagcagcccctggatatgggggcggatatcgtgatgcacaccacatccaagtacattggcggacacagcgatatcatcggaggtatgctggcggtaaaggaccaggagctcatgaagaagctgacggccaacagggaacttttgggcggaatcgtgggccctatggaggcatggctcatgataaggggcctgcggaccatggaggtcaggctggcggcgcaccaggccgcagccatggaggtggcaaaattcctggaggcccatccaaaggtacaaagggtgaattaccccggactcccctctcatccccagtatgatctgatgaagcagcagcagactggcaacaccgggcttatgagctttgagattcacggaaccacagaggatgcaatcaaggtggcagagagccttaagatatttaagataggcgtatcatggggcgggtttgagagccttgtgttcctgcctcacgccagactggatgaggagacgtgccgggtactgggggcaggtcagaatgttatccgcatccactgcggactggaaggtacagaggccttgatttcagatttggaatcagctcttgctaagatatagaagcatagaggaacagcaacaagaagcagtgaaaatcaagcagtaaaaaggaggagaacagatgaagaagaaacaattagcagcaatggcattggcggcagtgatgctgacaggatgcggaggcggcagtgctgctccagatgccacaaaagcagcagacagcggggcgtccacggcggcagacgcaggcaaaaaagaggcggacagccagaaggcagaatccggtgaagccgtcaccatcaccctggtggagtcccttaccagccctgagaggacagctgttctgagggagattgcggacaagtatcaggctgagcactcaaatattaccattgacatcatttccccgccgctggagaatgcagatgccaagattacccagatgcttatgaacggcagcggcgcagacatcgtggaggtgcgtgattccactgtgacccagtatgccaccaatgaatggattgccgatcttcagaagtacattgacgcgtgggatgagaagggcaccctgactgaatcggctgacgaggtaattcattatctcaagggaggcgcttacctgattccttacggattctatcagagaggattgttctaccgcgcagactggtttgaggagaaagggcttgaccagccggagacatggcaggacatctatgatgcaggccttgccatcacagacccggctaacagcagattcggctactccttccgcggcggccccagcggctatcagtatgcggataccatttactggagctggattggtacggataaggtggcagatcccaatgcggcttacttcttaaaggatggggacggagctactatctttacactgcccgaggtaaaggaggcgctgcatttctacaaagacctgtttaagaacacctgtcccacggactccattgcgtggggattctcagagatggttcagggctttgtgggcggtaccacagccatgctgattcaggatccggaagtaatcgctacctgttccgccgacatgcaggatgaccagtgggcactggttccattccccaagggaccgtccggccaggcagtattccccaacggcttcgcaggctggggtatgacatcctttacagaacatccggatgagaccgcggatttcctgctgtacttatctaattccgagaataacacatactttgccaagaactactccacaatcccgattcacaacaacgctgctgaaaaggatccttatttctctgagggacgttttgcaatgtatatggatatggcaaaggagccggatgtataccgtcatgctgcatatccgcagatgtacgaggcatttgcaacctacaagacagaggttgataccatgtaccagaaatacctgacggatgaaatcacggatgatgagctgctgcagtggttagatgagttctggacccaggcttacaaggatgagggccagaagtggtaaggccggattgaccagagaacgaatgaaacacaagcagtaagaaccggagggtgccgggagcgggggacctgctcccggcacttccggatacagagctgtgcgcgccgtgccggggaagccggcacacgcagccggcaaggaggggatggcatgaaacaaacgtcgaaattaaaaatgaggagagcccggtttatctttatcatggttcttcctgccatactgtttcccatgatatttacctactatccgatgataaaggggtccctgatggcattccagagctacaatctgatgaatgtcaagaatatcaagtgggtgggtctggaaaatttcagtaagctgtttgcccacaacaccagcaataccttctattccaccatgctcaacacggttaaatgggtgggaatctccctgtttgtccagtttacggtgggatttgccatggcattgcttctgaagaagaaatttaagggttccagcctttatcaggggctgattttcttcccatgggctgtttcgggatttattatcggcatcatgtggcgctggatgttcaacggaacatcaggggttatcaatgacctgctcatgaggatacatttaatcagccagccggtgggatggctggccagcaagaacacggccctttactcctgtatcatagccaatatatggtacggaattccattttttactattatgattacggcagccttaagaggtgtgtcggaagacctgtatgaagcagcggat

SEQ ID NO: 3169 - DNA, 2249 bp, Unknown
  gut microbiota DNA sequence
gattccattttttactattatgattacggcagccttaagaggcgtgtcggaagacctgtatgaagcagcggatgtggacggcgccagcccgtaccagaagtttaccaacatcacggtgccctgtattcgttccgtgctgcttttgacggtgctgctgcgggttatctggatcttcaatttcccggatttgatttactccatgacccagggcgggcctgcggggtcctccaacatcattacgtcctacatgatgcagctggtccagagtctggattacggcctggcgtcagcggtgggcgtgctgtgtatcctgttcctcattgtatttgcagccatttatctggttgccaccaagtatacggacgaggaggcatgatatcatgacaatgaaaactaagagaaggcttaaaagcctgttaaaatatttggtactggcatgtttccttgtgctgaccatgtttccctttgtgtggatgcttctcacatccttaaaagggtcccagggggaaatctatgcgtttccggtacggtatctgcccaatcccgcgtccgcggtcaactatgtggccatgctgtggaaggggaatttcggccggtatatgcttaactcctttttctcctcggcagtggcagccacctgtgcggtgtttattgccatactggccagttatgtcataagcaggttccatttccggtttaagaacgtacttctgctgtttttcctggtcacccagatgattcccatgtttatcatgctggcgcccttataccagcttctggcaaaggcgaagatgctcaacgacctgcgcagcctggccatgctctacacgaatatgatgattcccttctccgtggtgacattgtgcggcttttttgacagcgtgccaaaatccctggaggaggctgcctggatagacggatgcggctattttaaggcattgtttaaggtggtggtgccggttatcatgcccggtatagcggcaacatttatatttgcgtttatcaactcttggaatgaactttttatggctgtcatgtttatagatgtggataagttcaagaccataccggtgggacttaacggcctgattcttaaatatgatatcaaatggggcgagatggcagcaggaaccatcatgtccctggtacctaccatgtgtctatttgcctttgcccagaaatatatgatagaagggcttacggcgggttcggttaaaggttaagcgtgctgtcctgcataggaaccggccggggccggcggacagatatcaaatttgtccgccggccccggcttttcccgtggtaacataaggacacagatgatttgggccgggataaggaggaagaagatgagcatattatttgaactggagcggatggagcgtctggcggaggatctggaccggcttcgcaggccggtgaggattccagtcagctgttataagcggatggaaggaaaggaaaaaggcagtccctggtgcagccccctggattgggaggactgttccatagaagaaccatgggcgtgtctggacagccacaggtggtacaggacaacggttgagataccgccacatctggacggggcccatgtggaattcctgatcaccacgggaagggaaggacagtgggatgccaccaatccccagatgctgttttatctgaacgaaaacattgtccagggagtagatgtaaaccacagggaaattttaataagttccggggccaaagcaggagagcggtatgatattgccattctggcctacagcggcagcgtgccgggagacctgataatccgcacggagctggtccgggtggatgacgcggtggaaaaagcttactatgattttctggtgccggtacaggcagccaggcttcttaaaaaaccggatgaggaaaattacaggcggattctggtaaagctggggccggctgccgatgccctggatttgagggagccgtattcatcccggttctaccaatccatagaggagatggagagaatcgtggaaaaggaattttaccagaaggtgaatgcagcctcgcctgtggtaagcgcaatcggccatacccacattgacattgcgtggctgtggaccgtggaacaaaccagggagaaggctgtgcggagcttttccacggtactggagctgatggaccggtacccggattacaagttcatgtccagccagcccattctgtaccagtttgtaaaggaacaggaaccagaactttatgagcgcatccgg

SEQ ID NO: 3170 - DNA, 2146 bp, Unknown
  gut microbiota DNA sequence
agctgccgatgccctggatttgagggagccgtattcatcccggttctaccaatcaatagaggagatggagagaatcgtggaaaaggagttttaccagaaggtgaatgcagcctcgcctgtggtaagcgcaatcggccatacccacattgacattgcgtggctgtggaccgtggaacagaccagggagaaggctgtgcggagcttttccacggtactggagctgatggaccggtacccggattacaaattcatgtccagccagcccattctgtaccagtttgtaaaggaacaggaaccagaactttatgagcgcatccgggagcgggtcagggaagggcgatgggagacagacggcgccatgtggctggagtcggactgcaacctgcccgcaggggaatcactggtgcgtcaaatcataaagggagagcagtttttccaggaggaatttggcatttccagcaggtgtctgtggctgccggatgtatttggctattccgccgccataccgcagatactgaaaaagtgcggaattccctatttcctgacaactaagattgcctggaaccagtttaaccagctgcccaacgataccttcatgtggaagggaatcgacggcagcagggtgtttgtattcatgcctactgcctgcgactttgataagactctggggttaaatgtgtcatttaccgacaccaggaacaccaccacatacacaggcattgtcaatcccaatatgacgctgggaaccttcaagcggttccagaacagggatctgacagaggacacgttaatgctctttggatttggcgacgggggaggcggacccacaaaggaaatgttagaggaggcaaagcgtctgcagtacgggcttccgggcattcccagactggtccaggaaaatgaacggaccttttttgaccggattcatcacgacattgggtccagaccggacatgccggtatgggatggggagctttactttgagtaccacaggggtacgctgacctccatgggaaaaaacaaacgctataaccggaaaagcgagcagatgtacgaacagctggagactctgggagtcatggcggagcttaagggcctggaatatcctgccggcgtcataaaaagggggtgggatatcatcctgttaaaccagttccatgacattattcccggaagcgccatcgggcctgtctatgaacagacggaccgggaatatgaggaaatacttaaatccggcgcagagacagcccttcatctggcagaaggcatgggaagcaggatctgcggtcaggataaggataccagccgggaggagccggaagaacaaaaaccggaagaacataagattattgttttcaatacacagggatatgagcgggaggacacggtaacagtgtccggtgtggcccggggggaggcggcatatgcctgcgactgcctgggatacagggctccggtccagtatgtgggggaggatacgcttatattccacgcaaaggggattccttcctgcggttatgctgtgtacagccttgtgggggcagaggatagtgtgaaccagggaacgtccgggtctgccaaagaacatcctgtgctcgccgcagaacaccccgggcctgacccggaaccatccggatttgacgcagaatgcccgcgcccatggcccggcttctttgaaaatgactggtacagggctgtgtttaatgataagatggagcttgcttccctggttgaaaaggggacaggctgccagctgttaaaagaggggcgtgtgggaaaccagctcctgacctttgaggaccgccccatgaactgggacaattgggatgtggatatgttttatcagagaaagccgtacaatgcagaccatgtgacagcgccggttttaaaggagtgggggccggtgcggacggtggtgtccatctctcaccggtttgcgggctcccttgtggagcaggatatcgtgttctaccccaatctgcccagaatcgactttgtgacccgggcagactggagggatcatcatgttctgctgagggtttatttcccggcccggattaacgccaccaaggctgcctatgagatacagttcggcaatgtggaacgggagaccaccagcaaccacagctgggatacggccaaattt

SEQ ID NO: 3171 - DNA, 665 bp, Unknown
  gut microbiota DNA sequence
agatcatcatgttctgctgagggtttatttcccggcccggattaacgccaccaaggccgcctatgagatacagttcggcaatgtggagcgggagaccaccagcaaccacagctgggatacggccaaatttgaggtatgtgcccataaatgggcggatctgtcggaaaacggcctgggactcagcctgcttaacgactgtaaatacggacacagcatcaaggacggggaaatggggctgaccctgattaaatcagggacctatcccaatgagaacgcggatataggcttccatgaatttacctactccatttatccccacaagggaaggtggcaggaagccagaaccgtggaaatggcctatgacctgaattcgcccctggtatccgccctggtgcccgccaaaggagcaggagggttctggagcatggtgtccgtggaccagccggactgttttgtggaaatgatgaaaaaggcggagaatgggaacggatatatcctgcgtatctatgaaaaccgcaatacaaggacgcccatgacggtaaaacttggatttgaaatttcccgggtggaggaatgtgatttgctggaaaggacactgaggcccattgagacagatggatacaggtttaaggatttcataaaaccctatgagattaagacatacc

SEQ ID NO: 3172 - DNA, 1630 bp, Unknown
  gut microbiota DNA sequence
tatgacggtaaaacttggatttgaaatttcccgggtggaggaatgtgatttgctggaaaggccactgaggcccattgagacagatggatacaggtttaaggatttcataaaaccctatgagattaagacataccgcatctgtcccgtccgtgcgtaaggtcccggataatcaggaatcggaatgtaagggaggattcacatggaagaacagagggcatggtggaaagaatgcgtggtgtatcagatttaccccagaagcttccaggacagcaacggtgacggcatcggcgacctgaacggtatcaggagccgcctggattaccttaaggatctgggaattgatgtaatatggctctccccggtgtatcagtcgccgggggatgacaatggttatgatatcagcgattataaggctgtcatggatgtgttcggcaccatggaggacttcgacaggcttctggcagagatacatgaaaaagggatgaagctggtaatggacctggttgtgaaccatacatcggatgaacacgcctggtttgtaaagagccgccgttctcctgataatccctacagggattactatatatggaaggctcctgtcagcggaggcccgcccaataactgggcatcccgcttccgcgggccggcctgggaatacgatgaagggaccggcatgtattaccttcatatttattccaggaagcagcctgacctgaactgggaaaatccccgggtacggcaggaaatatatgatatgatggcctggtggggagacaaggggattgacggtttcagaatggatgtgatatccatgctgtccaaggaccagcgctttccagacggggtgttgaaagagggaaatccctatggcgatggtctgccctattatgccaatggccccagaatacatgaattcttacaggagatgaaccgggaggtcctgtcccggtttgactggatgagcgtgggagagggcgtgggtgtgggaaccagggaggcagtgcagtatgcgggatatgagtcccatgagctgaacatgatgttccattttgaacatgtggaactgaatcccgggccatttggaaaatggaatgacaacccggtctgtctgagagagctgaaggaagtgctgaacaggtggcagacagaactggagggaaaggcctggaacagcctgttttgggagaatcacgattatcccagggcggtgtcccgctttggcaatgacagcctcgtgttctgggaactgtccgccaaaatgctggcagtctgtctctatatgatgaaggggacgccctatatttaccagggacaggaattgggaatgaccaattttcagggcagcagcatagaggacttccaggatatagaaattcataatgtataccgtgaaatggtgggcagcgggcgcatttcccatgaggagatgatacgctacatcaaccatatgggacgggacaatgcaaggacgcccatgcagtgggatgatacggcccaggcaggattcacagaggggacgccctggcttggggtaaatcccaattatacctggctcaacgcaagggagcaggccggacgcggtgattccgtcctgtccttctataagcagctgataaagttaaggcatacc

SEQ ID NO: 3173 - DNA, 2435 bp, Unknown
  gut microbiota DNA sequence
tgcaagggagcaggccggacgcggtgattccgtcctgtccttctataagcagctgataaagttaaggcataccatggacatcctggtgtatgggacttaccggctgctgctggaggaaagcgggtccgtttatgcatatgaaagaacactgggggatgagcgcctgacggtactgtgcaattttacggaccagacacagagttgcggtctttcctgccgggacctgggaacagataacgtacttatcggcaattacccggaccagagcggcacgttccggggaaacggcccggccctgcatgaagaggaggatatctgcctcagaccctatgaagccattgtgcttacgcaataattgctggaggattctatatgggcattatatacgaagaaaaatcaaggcagttccatctgtacaacgataaaatcagttatatcatgacatgccttcccaacggtcagctggggcagctctactatgggaaacggctgcggcacagggagagcttcggccatctgctggagtttgcgcacagggatatggcgccctgtgtctatgaggatgacaccacattttcactggagcatatcagacaggaatatccggcctttggaaccggggatatgcggtatccggcttatggaatcagaagggaaaatggaagcagggtcagctgttttgtatacaaaagccacaccatccaagggggaaaaccggaattgccgggcctgcctgccgtttatgtggagcaggatgaggaggcacagacactggagctatatctggaggatcctgtggcaggtatggaactggtgcttctctatacaatctatgaaaacatgcctgtgcttacccgcagcgcccggtttatctgccgcggtccggagccggtctgcctggagcgggccatgagcctgagtctggacctgccggatccgcgttaccagatggttgatttgaccggggcctggtgcagggaacgctatgtggactgccatggacttcaccggggagttcagagcatacacagcatgaggggacacagcagccaccagttcaatccgttcatctgcctgaaacggcctgatgccggggaggacagcggtgaggtaataggcatcagccttgtatacagcggtaatttcctggcccaggcagaggtggataccatggatacggtccgggtgaccatgggaatccatccggagggatttgactggcccctttgtccgggggaggaattccagacgcccgaggcagtgatggtatattcaggggacggcttaaacggcatgagtcaggcgttccaccagctctacaggaccaggcttgccagggggtattggagggacagggaaaggcccatcctgattaataactgggaagccacatacatggattttgacgaggaaaagattctctccattgcagacaaggcaagggagctgggcatagagctgttcgtgctggatgacgggtggtttggaaagcgggacgatgacaccacttccctgggggactggtatcccaacctgcataagctgcccgatgggataacagggctggcaggtaaaatcagggacatgggaatgaaattcggcctgtggttcgagcctgagatggtcagcagggacagctgtctttaccgcgcccacccggattggatgttagggagtacggaccggccggtgtgtacggggagacaccagtatgtgctggatttttcaaaggaccaggtggtggaatacataggggacagaatggaggagatactgggggacggcggtgtgtcttatgtgaagtgggatatgaaccgtagtatttccgacctgttttcagcgggccgggatgcgcggtaccagggaaccgtgtaccacaggcagatactgggagtctataaactgtatgagcggctcaccagggatttcccccatgttctgtttgaatcctgcgccagcggcggcgccaggtttgacccgggcatcctgtattacgctccccagggctgggtttccgatgacacagacggggtggagcgcgtgaaaatccagtacggaaccagcctggtatatccggtcagctccatgggaagccatgtttccgccatacccaaccaccagacccagaggaatgttcccctggcttccagggcagcggcagccttttttggtacctttgggtatgaactggatctgaacctgcttacagaggaggagcagtaccaggtaaaggaacagatacggttcatgaaggaacacaggaaactgattcagcagggaaggttctaccggcttataagtccctttgagggaaatgaggctgcctggattgtggtatcggaagacgaaaacagggccattgcagcttatttccggttcctgcagcctgtgaataccggttttaagcggctggtgctaaagggactgaatccggg

SEQ ID NO: 3174 - DNA, 865 bp, Unknown
  gut microbiota DNA sequence
gcctttgcaaggttttcagccacctcaattccgataaagccaccgccgataaccgctgtgttctccgctcctgcggcctccagtccatcctttaagtgaacaatatctgccacattacggactgtatacacattttttccgtcaattccgccgatgcttcttggctttacaggtgacgcgccgggagccataaccaaaacatcgtaggcctcctcatgtatgtccccggtcagcgtgtttttaatctcaatggtctttttgtcacggttaatagccatcacttcgctgttaacccgtgcgtctatatcgtaagactttttgaatttttccggggacatcattaccagtgcatcactgtttcccactactcctgacagataatagggaagagcacagttggaaaaggacacatgctggccacgctcaaacataatgatttctgctcccgcgtcgagacgtcttgctctggctgctaccgaagcgccgcctgccacgcctcctatgatcagaatccttttattcatggaaaatcactcctcgtataatatcttttagatacataaatacatatattttggttaataagttactaaataaatatttgttcaataggcttagtaaagcccatgatataattgtcccagtgtcaatcaggtaatagttcttttcactcctgttgaaccagtaatggttgcttcatactaagtctgttcccctgacatggaagttagcttcaaaccggctggctgtttgcttaagttcatggataaccatctagcagtgtggtttcgcatctgtccatcttaagctggattcttatatgcgagggtgtcgatgctccatgatcatgggttttaccaagccg

SEQ ID NO: 3175 - DNA, 84307 bp, Unknown
  gut microbiota DNA sequence
gcccgggcataatgcccgggcggcctgctgttatgttacatactaaaacgcattttatgattttcctaaattaatcccatcaggcccggaatacccagcgacagcgccggtatataggtaacggccataagcaggaggaacagtaccgcaaagtagggaagcagcgttctggtcacctgttcaatgctgattttgctgatgccgcagcccacgaacagtacggaaccaacaggaggcgtgatgttgcccaggcacatattgaagattaacatgacgccgaactgaatgtcagtcattcctaaactctgggcgataggaaggaaaataggagtaaaaatcaggatagccggcgtgatatccataaacattcccacaaccatcaggattatgttcatcagcagcaggatcacgtatttgttggtggagatggacatgatgccttcgctgatggctgccgggattcctgagtatgccatgacaaaggacatggcggaggaagcggatatcaggaacaggatgatgccgctggtgcatgcgctgcttacaagaatcttcatgaaggacttcacggtaaggctcttgtaacagatggaaagaatcaggcagtaaagcacgcagatacctgctccctcagtggcagtgaagatgcctcccacgataccgccgattacaatgatgatgagcagcaggctgggaatggcttccaatgtcacttttacggcttccttcatgggggtgcggccggataccggatatttatgctttttggcgtaaatgaaagccaccaccatggagccaacgcccatcagtatgccgggaatgtatccggccatgaacagagtggatatggacacgccgcctgctaccgtggagtacacgatgaatgcgctggtaggggggatcaggagtccggtgggagccgaggcaatgttgacggccgtggcaaaggcagggtcgtagccctcgtccttctggatgggatagatacagccgcccatggcggatgcagctgccacggatgaaccggacagcgcgccaaagagcatgttgcccacaatgttggcctgggccagggaacctggaatccagcccacaaacagcttggcaaagttgacaaggcgtctggcgataccgccgttattcatgatgttgccggccaggatgaagagagggatggcaagcagggagaagctctccacgccgctgttcatcttctgcatggtgatgaaggtaatctggtcccaggacaggctggagacggcagttacgatggatgcgattacgatgctgacggagattgggcagctgaggaacagcaggatgccaaataccgcaaacagaatgactgttgtaagtccgatactcattactcattccctccttctatggtgattccggttacatcctcatagatgttgataatctgtgccaggatgatgaacagtccggagatgggcgccatggcatataccaggcttctgggaatccccagcagcgcggagaacaccttctgggcgcttaacgccagcttgaatccgcctatggtgatgacaaagacggcaaagagcagaatcagcacatcaataactgtcatcagaatccggcggcctgccgggcttaagctgtcacgcaccagcaccaggcacatgtgttccctggtgatgaaggcataggcagctccgatgaaaccggtccaaatcaggaagtaacgcaccagctcctcggtaaaggcagccgggctgttgagcacgtagcgtgtaaatacctggtacaggaccagaagggtcataacggacagcagcacagtggctatgccggctaaaagacgggtcatccactttttgatgacagataatatttcattcatgtgattacctccccttattctaccgaatcaatggtgtcaagcagttccttcacacccggatactgtgcgcagtaatcgtcaatcataccgcttgtggcctggcggaacgcatctttgtcaacatcgtttacgaattccactcccatctgggactctgcctcctggatggcctcatcaatggcggcatcccatgcaatcttgtggctttccgtggattcgcgggctgcttccaggatgatgttctggtcctggggactgatggtcttccataccttggcgctcatgaccattacatcgggaatcatggcgtgctggtctgtggaatataccttgcagatttcgccatgtttgccggtggtaagtgctgtttcattgttctcagtgccgtcgataatgccggtctgaagagaggtatatacatcgccgtaggacatggctaccgggattccgcctaaggccttcatcatatcagtctgggatttcatatcctgtacacggattttcagcccctttaagtcagccggcgtgcggattgccttgttcttggtgtaaaaggaacgggcgcctgaggtgtagtaggtcagggtgacgaatccgtcgtcagaggaggaaaggaagaagtcctgcatcggatcagaatccattacatggtaaaagtcttccgtatcgtcaaagatatagggaaggccgaaggcatgataggattcgttgtaggtggcaaggccgggagcagataccttggtcatggaaatgacaccggccatcagctgctccatgttctcattttcggaacccagctggccgtttggaaggatgcggacctggattcgtccgtttgtccgttcctccaccttgtctgcaaattctgtcatcgcaatatgtaccgtatgggtctcgctgaggccgtgagccagagtaagcaccatgggattttccgctgaggcctccgcgctggtcttggcgccgctctgggcgcacccggaaagccccagtaccgccaggctcaaagccgctgccattgctgctgcaaattttttcattttcaatatcccctttctatgtagcggcttcccctctgtaagcgggaggggaagcgaatgcctgtctttacataccaatcaggtcgaactgctcaaaagatacgatcacctgataatccttcttaggattagggtatttaatctgaacggacttaagcctctggctgtaataccatccgcagtccgcatcctcaaattttctcctgtggaggaaatgaggaatggtctcgccgtctgccttaacccagtaaggtgctttctcacggtgtatcatatccagatacagcgtctttacggctgtctcataatggccttcctgatggaaatccaaaacagtgcgttctccggctgtcatggttatggaggtcttcaggcagcctcccttttcatagtccatggaaatgccgtcgtcctcatagagttcaaaccggccgtccctgtcggccgcgcacaggattcgtatgtgttctgcctgctgggtctttaggttatcaagcctgtcttccgccatgggaataatggctccgcttctcacaaacaggggtatggatcccaggtccacagggagctccacggtgcgtccaccctcataggcggcccttgtatagaaatcgtagaaggtttcgccttcaggcaggtatacctttctggagacggcgcccttttccaccacattggccaccagcagggaatcacccagcataaagtccacgccctcctcgtagcacttcacatcttcctggaatgcactgcacatgggctccatgatgggaagtcctgtttcatgggcccgctccatcagtgagtagaggtagggacttaactggtagcgcagtccgatagcctcccggatgtaatccgtacagtcgccgtacatccagggttctgtcaccgtgttgtcggtgttggtggagtggatggagaaacggggctggaatataccgttttgaatccagcgcaccataagctctgcttccggcgacggtccgtagaagccgccgatgtcgcagccctggttggctacgccggaaaggctcatgcccaggatggttgcaatgttgtattttaaggagtcccagcaggtcaggttgtctcctgcccaggtctgggcatagcgctggatgccgcagtggccggaacggcacacgatataagggcgggtgttggtgaaggtttcgtgaatagcctcatccgtgatatggcacatgatattggacatgacggacttcagctggccgatggtaccgcccttgccctcaaaatcacaccggcagtccttatccaccaggctgtcatattcacagttgtcgttccacacagagctggtgccgtattccaggacattttccttaagcatttccttccagtaagtccgggtgcaggggttggtaaagtctgcgaacacacccttgccgccccaccatgttccgataccgggttcatcgctgccgctggcctttataaacatgcctttggctttcatctcatccagcttaggatgaatcaggaggatgcccggcttgacgttaggggacacggttactcctctcttttccatctgagcaaagaattccctggggtccttgaagcgctttttattccaggtaaagacgcagcgcttgatgcctttatccgtttccacggtgcagtagccggaggaaagctggaaaccgtcaaccggtatcttctcttccctggtggtgtcgatgaaatccaggatagcgtcatcgcagtcattatccagctccggatagtacatggaggatcccaggtatccaagcgcataccggggaagcatggctgatttgccggtgagatccgtatagcgctccacgacctgacgcacggaggggcctgcaatgaggaagaggtcaatgtcgccgccgtctgtccggtaacggctgtggggcttccagtagttgctcttttcgcggcccatatcaaaatcgcactcacaggtgttgtggtagaaatatcccacagccttcctggttccgcggtttaattttatgtaaaaggggatatgtttgtaaagtgaatcggtttccctggggttgtatcccatggcgtctttggggctcatgctcatgaatttctgggctttgttgaagctgccgctcttctctccaaaaccgtagaaacagtcttccggtgaaatctcactggtgtgaatccggcggtggttgctgtcctccatataggccaaatccacgatgtcggcgtgaagcagggttccctctttgtcatacacgcagatgcgaaacggatccttctccaccactaccttcagaatacgtccctcaattaccgcctccctgtccccgtccgacaggactgcgtctgccgcttccacccgtgttctgcggcccttcaggaaatcatccatccggtcttcccatgctgtcatcacaaggctgtaggattcctccgcgaaatcgccgtcaaatccggccctgatacgcaggatggaatctgtcagaaaaagaatgcggatttccacactgttggtcatcactgaaaagtaactgtcctttttggcgaccgtgtaagcattcgtacaaaccttcataaattgttgcctccttgttttatttcaaccggttttatgttattatcatatagaattaaggccgcctaaactagacaatatttgcagtattatggtggaaattaaacatatcttgctgtattaatttggaagcgctatggtgtttccgtgtgttttacgtatataaaaacatgggaattggatatatgtaccaaagaagggagaaaacggattgatagaccaggctggaattatgatggctcagggaaggagcattgccggcgaacgcatacagggagttaatgacaatatgtcaaagtcccattatcatgattattttgaattatattatctggaggaaggagaacggtttcacattatccaggaccgtctttactgcatccatccgggagaattccttatattttccccctatgtgatgcaccattcctacggccaggagaatgtgccgtttaagcggctcctggtgtatttttctaaggaggaagtggactccgtgcagctgttaaaggtgctggaaaagggaaccggggtatataagccggaccagcgggaaaagcaggtggtgcaccgcatgctggatgacctgcttaaggaacaggacgaccctcaggcttatcatgaggactatatccataccctgttaaacatggccttactgaccattgccagaaacattcagacaccggtgaagccggaaaagcgcaaccggataacagatgtaatcagctatatccaccagaattaccaggaggacatatccatagaccagctggcccagatgtcctatgtgagtccctactacctgtgcagggagttcaagcggtataccaacagcaccattatccagtatgtgaatgttacacgggtcatgaatgcacagaggatgtttatggaaaccaataaaaatatcacggaaatcagccgggacacaggattctccaacatcactcattttaacagggtgtttaagtcggtcatgggaatgacgccatcgaatttcaggaaaatgtataagacggaggccggacatggcagaaggacgatttgatacggcccgtcccggcgggaaccgggctgcaaagatgccgaaggggcagccctatgcggggtttaatatgcagttctgcatcctgtcggccctgggtatgttttttgtggtggacgggcatctcaataacagttatctggacatcgggggactggtgccctactactcctttcacatgcccctgtttgcctttatctccgggtatttttacaaaaagggaagcgagcaccggctgggtgcctatacgaagaaaaagataatccgtctgctggggccgtatatggtgtacaatctgatttatggcatgattgcccaggggctccacagagccggctttgccttcgggggagatttgagcttatggaatctgtttgtggaaccatttatcacaggacatcagtttgaatataatctggctgcctggtttgtgccggccctgtttctggtggaaatggccaatgtacttttacgccgccttttaaagcgggtggattctgaatatgcagtgttttttttgtacctgtccataggggtatggggcatccttctggcattttccggccggtatcagggcggatggcttacgctggtgcgtatgatgttcctgctgccctgctacggcgcaggcaccctgtataaggagaagctggaggcaggggacagggcagaccatgggctgtactttggcattatcctggctgcctggctgcttctggccatgtccggccgccccctcatctactccgtggccttctgcaacggttttacaggaatcctgatgccctatgtcacggctgcactgggaatcgcgttctggctcagggtatcccgcatcctggccggagcatttggggagggcaggtatatcaggtattttggcagccatacatatgcggtgatgatgcatcatatcatggctctcatggttcttaaaaccctgttcgctgcactggcaaagtacactgccctctttcctggattcagttttgaacagtataaggcagacctctggtactgctattttcccaaagctctgcctcagttcagggtggtttatcttatatgggccattgtgctgccgctgttgttccagtgggtatttgacaggttaaggcttcattggggacgggaggccctgggccgtccccgtgccggctttaaagggtaactgtggtgcagaatcaggttgtcagctgtttcctgatgcatctggtagtaggcgctgcagatgcggtccgcgatgactcccacattttctatggacacatccagcaccattaccaggtactggcagctgctgtatctggtgtacacatctcccatacgcaggctctgttttattttctcccccagaatatccatctcagcatcccttttgtccagggggagaaaaccgttatttctatctgtcagggtaaacaatatgatgaaagctcttttcttatcccttctgaggcgccgttcttccaggcggtagatttgtttaaaggtttcataatcctggcagtaggctcctggctgggtttccttttcctccatttccatggcgatcagactcatatcgggctgtatgccggccggttccctggacggggatatgaggccggtgtcatcctttagattgcgaaggcgcttttttgccatgattttctgatccgcgcagtcaaacatatcccggtatttggtgcaggtccggctgtctgcactatctatggtgatggacagcttaattaggatggaatcacccagccgcacttcgcggaaccgctcctgaatccgcaggcattctccggctgtcattgggtcgtccagaacagagggaatgaaaattacgaactcatctcctcccacacgccccaccagattgcggccgctgaacatttttttcagcacattggcaatggtgcacagcagcatatccccggcaatatggccgtaacggtcatttacctgtttgaaatggtccaggtccagaacaatcatggttcccggctgcttccggcacagatggtcgtccaccctgcgttccatggtgatgcggttatacagtccggtcagtccatccagttccgccagggtctgcagggcacaattttcctgctccagctgtttgcgcgtctttttgtaaatgtctgtatgctgtctctgtttcattttacatccctccagatatcacgttgtgccctgccctttcagagcacactccagagcccgctgcattttctgacagctgaccggcttcatgaagaagtagctcacacacattctgtaggcctgtactccgaaatccaggtcggaaatccagataagccttctggagagcggctgcgcactggatgcggtatccaggcctctcacgccgtccagggaaacgatgactatgtcccattcccttccttccagggcagcggccagttccatccagtctttacaggtattaatctgtatttcaaggtgtttttccgaggcccatttaagaatgtaatctatcattaaggatcgttctgacaggttgtcgtcacatatgatgatttccatgccgtgctccccctttcgtatatgggttcttagatttaattcaaacataacgtttttctgccatattttcaatggggtggcttcattttgcaggttttggcccgattttgcatttgccatacggatttgttttttgtaaaatgaaatcaggaaagcatttcttgccggtacggggggaggattttatgcaagttgccattatagacgatttagcggtgtgcagacaggagataaaggaatatcttctgcgctatatacgtgaaaattaccagggggaggagccggaactggatgagtttgaaagcgggaccaggttccttgacgccttccggcctcaggtatatgatgtaatttttattgatcagtatatggaggggatgtctggcatggacactgccagggagatacggagggtggatgaggaggctgcccttatttttgttaccaccagctgcgaccatgcagtggacagctatggggtcagggcctgcggttatctcataaaaccctttacatatgaggcgttcggggaaaccatgagactggcccgtttggagaagataatgaacgcccgtttcattgccctgggtgacgacaggatattgttaaaggaaatcctctggtgtgaccgggacggccattatgtgcagatccatacggatatgcggggagtcctgagataccgtgtgaccgttgcgtttctggaggcggtattatccgcctatccccaattcctgccctgttacaggggactcatcattaacatggaccgcgtgaggcgcatggaggagctggaattccttatggataccggtgaacgtgttccgtttcgcaagcgggaccataaggaaatcaagagccggttttcacagtacatgttccggcgggcaaggggggaggatttgttatgatagatactgccatgatattactgtttccatttctggattttatacccttcggccttcccaggtattggattcacagggataaattaaaaatcaagtacaggtatgtggtggtgctgctgacagcggtatcgtgcgtgaacagcgcagccttctatcttatcaatcaggaaggctatgaggcagctgcccgctggactaccctgatgcggtatggttttatgctgtttaatctgatgtgttcatttttattaatcagagagcagttccagaagcttatgttcacatacctgcttttaatgtcctggtccttttttgtgtttggcaatgccaatttcattgaaagccggtttttctgggacttttcagacagacatccgtatctcatctataatacggcaagggtggcgattctgcttatcacctatccctttatactccattttctgggacataccgtgagggaagccctgaagatggaggacaggaagatgtggcagtacatgtggaagattccgctgttttccactttgttcggcatgctgtactgcacggtgcaggatgtgtatgcctatgcttcctggcagttcctgatttccaggtatctgatgctgcttggaacctgttatgtgtcctatgtttttttgaaggtgttagaaatatcccgcagaaagacacagctggaggaggaattaaagtatgcggaccggagccttctggcccagaaaaagcagtatgaaaccgtatcagcccatatggaggaaatgaaaaaggcgcgccatgacctgcgccagcatctggccgtggttcagtcctacatagagaggaatgacagggcgggtctgtccgagtatattgagatttataagacagagctgcctcctgatatcatagaaatatactgccgcaaccaggtaatcaatgcgttaatctgctactatgcctcccaggcccgcaggcataaaatccgttttgaagcccaggcggactacccggagcaatgtcatgtcccggatacggaggtgacggtgatactgggcaacctgctggaaaatgcggtggaggcctgtctgcgtgagaagaatggtaaatgctccatccggctgcggatattcaggaaaaacagcagcctggtatttctgacagataacacctgttccgggacagtgccgtttgacactgacggaaaaacacccctttcctccaagcggaaaggggtgggaatcggcgtatcctccatccgggaaattgcggacaggtatggaggagatacattatttgaacaaaaagccggtatgttttatgcctccgtatggctgcagatcccggaaaaggcggataattagccagccttagtttggagccaggggaatgatgatggcggccacaaaataagctatgattccggggccggagcaggcaaagatggcccaaataaggcggatgatggtggggtcaatgttaaagtactctccaatgcctccgcatacgccgcagagcattttatttatgtttgaacggtataatttcttatccatagttctatctccttttctgtaggaatctataagatttggtcaaagtttacagcaatgtttcccacgccgcattccagttccatggtgtagggagccttgttgttgatgtgagtttcgtgtgagagcatgctgtagtgttcagcgcccacatcaatgcttcccacgccgcactccacctggtaattgtacccgtcttgggaaccggtcaggttaagggccacatctcccacccctgtctcgatttccacatccccgttgacagtgcctgaaaatgtaatggcgccaactcctgtgtcaatctccagtttggagacagtgacaccaaggaccgtgcactccgcggcgcccagatccagggacaatttgtcaagcccgtatcccgccggaatcagaatctcgattcgaggagcctcattgccccggctgcgtcctgattccctcttaaccttcagtgtgaattcatccatgtagcattgtgtgcggttataggtatcctgtacgttgacctggatttgggaaataccctctttttctgaaacgcggattacccctttgtctatatccacatccagttttctggcctgtgcataggagggatcggataccgtctttatctgtgaggagccgcgggagcggtctgtatcatccgggtcatccgggttattccagtcatcccagttatcccaggcatcccagtcatcccggtcatcccagtcatccgcccggtcatcgccccagcggaccagccatggcatgtggttgtgccataccctggaggccaggcgggacggcaggctgtttgtataccgtcctcccatggcggctgaaacggcagtgatgcccaggccaagaagaaggagtatcagtccggtgatggcgcatatttttacgaatctcttcattttattacctccctcggtgaagcaggcggctaagcccatttacgatacttcgtataatgaaggggatgaacctcccgtaaaacagtacggatagagccaggcacagggcaccggcgcccagcagtattaatcctgtgccggaggccatgagtccatccagtggatgggaaaacatgtggaacacaccgtagggaagcataacgataccgcccaggagcactgcaaaggtggtggccccaagtgtcaccaggacagctgtcagaatgcccaggactcccgcggccagacccagcagaccgccgccaacaccaaggaacacgggaaaggccacaatgatgagcacagcccataatatgagctttatcaccttgctggtcctgggcggagggggattggaagttccattgttctcctctgtataagtctgctccggcccatggttaaaaccgcgtttctggtcaaagctctgttcccggtcaaagctctgttcccggtcaaagttctgttcccggttatagccctgtccccggctgccgcttccctggccgccgctctcctgctcttccggcaggtccagacgctttgccatggcatagccgggatcacggaaccgctcatcctgatatccctgttctgtgaattctccgccgctctccagatgtccggctatgtcagcacggatgatggcggcaatccgttcagggcttcctaattcctggatgacctctgcttccttatcaggaccggcctcttcaaagtaatctgtatagtattggaccgcatcgtccttgtcttcatcctggatgtcctgcagaagatatgcaagctccttcataaactcatccctggtcatagcttcgcctccttaaatatctgggatatcttctgtgaataagttacccattccccccggtacaaattcagctgtaccctgcctttttccgtcagcctgtaatatctgcggttcctgccgtcaatggccatatcatacacttccaggcagtcctccttctggaggcgtctcagcaccggatataaggtggactccgaaatatcaatggcctgccggacatcctgggtgattttatatccataagtcccttccgcatccttagagacaactgccagcacaatagcgtctaaaagcgcggagccagtgttaaatatcataagcacccctctgttctaaaaacaatattattagttgcgtcatattatacaatatataatatagttatactatacagcatatagtattatatgtcaacacaagaaattcaaaagattctgttatattttcttaagcctctttagaaacaatttaccaatcagtcaaacttaagacacaaatagccggtatactataagacataaacaagcagtcagagcttttaatatagataccatacataataagccggtgggattggcagagggcctttcttaccggctcaacctaatttatggagtaatgattgaaaataagaatggaatcagctacaatggaacaatcaagataaaaagcaggtaatagaaatgaacgcaggaatcattgccgggcagatgctggttttgttttttatgatgttggcaggttttattgcctttaaggcgcacatagtctcacaggccggctctaagagcctgtcctcggttatcattaatatctttaacccatgtctcatcatatccggagtactgaataagaaaatcacatacagtccccgcatggtagcagagaacctggttctggtggccgtgttttttctggtgctcattgtcctgagccgtctgttcacaaagatgatgaggcttctgccgggggaggtaaacagctaccgtctcatgatgatatttcccaacctggggtttatgggaatcccgctggtgcgcagcctgtacggtgaggaggctgtaatattcgtggcattttatattgttggttataatcttctggtttattcttacggcatacttttggctatggggacaagggatgattgcgaagacgctggaaaggaagcggcaaaacgggccgggcttccctggaagaagatgctcaatatcggaatgggcgcctgtatcacggcaatttttatatttgcctttcacataagggtgccggagccggcagctgattttgtggacagcatgggaaacgcggcagtgcccttatccatgatgactgtgggcatcatggtggcccagtcggacttaaagtccctggtaacagacaaaaagcagcttctctttgcctttatcagccttttggtcataccggcagtctgcataccgtttatgagaatgctgcctgttgacaaggtttcttatggaatttttattcttttgattgcaatgccggtgggcagcgtggttatgctggttgagaaggaatatggcgccacggatggaaggatatcggccaaaagcattgctttgacctccatcctgtccgtgctcaccattcctgtgattacatatctggcatgacaggggacggttaagaaggggtggctgaaccatcccgggatgtacggtagatattcattctgtttctgcgggcaaatccgatgacagtcagattgtattcagcagccagctccagggtaaggtctgtgggtgcggagcgggatacaatgacaggtatgcctgcccatatggccttttctgcaatggggcgcggaatccggcctgtggtatatacactggtgcctgcaaaatccacacggtcctttaaggcgcggcccactgttttttcaaaggcccggcttcggtccaggtcctctgtcatgtaaaggaccgcacagtcacggcacagcattacgctgtggacattgccggttttgcgaaacagctccgaggcatccagaaggtgctgtgacagagagagtatgtgatcaggacagatgtgtaaatccgggaggcggaccatggtgcggtccgtttcccggattttcagatccgcccggttaagagacggacggatgcttaaatccattatatcctcaggggaggagatgacgcctgaggtataaagcctgcctaagagcatctcctccagatattccggaatacagtgaaggacttcggtgcagcggccgttgatatggacgtttagggaacattccgccagcacttcgtccatggaaggcgtttccctgccgtcttcataccgtatgacaggatactgtttcgtgaattccatcatgttttatattcctttccatcacgctttttggattcggattgcgcaggctttatattctgggattctcgccaggtcgtccagcgcagcgttggtaatccggttcacattgccgtccgcgaagtggaaggtcatgaaggcctcctgcgggctgactttctgtcccacccgcgcggtgctggtaatccggccgcgtctggaggacacaagtactttgtctccatggctgatgccaagggccttagcatcctcctcgttgacctcgatataggattcgctgcagatttcattcaggccctcggtccgttttgtcatggcacgggtgttatagtggtagagcatgcgccctgtggtcagcaggattgggtactcctcatccggaagctccctggattccttgtaaacagcgggatagaaatatccaagccctctggagaatctgcccgcatggagaatgggcgtacccggatgatctttggagggacagggccactgcaggctctcacccgcatccagcctggcgtggctgattccgccgtaggacggggttacgcaggctatctcatccatgacctgggctgcgctgtcataatggcagggatatcccatcctgcccataacgtcgcagaatatctgtatgtcatcccttgccagccccgctggttcaacagccttgcggacccgctggagacggcgctccgtgttggtgaaggtgccttccttttcagcatagctgacgcccggaagaaccacgtcagcgtaggcagctgtctctgtcatgaaaagttcctgcaccaccaggaaatccaggctctttaatgctttttcaatatgtcccgtgtccgggtcagtcacgattgggtcctcgccaaagatatacagtccctttatgctgccctttatggctgccgggaaaacctcggtggaggtaaggccgggcctggtatttaattccacgctccacgctgtctggaatttgtggatgacgtccgggttggccaccttctggtagccggggaaatctgttggcaggcatcccatatcgcaggcgccctgtacattgttctggccccgcagcgggttgatgccgcagcctggcctgcccagtttaccggtcatcatggccaggttggaaaggctcatgacgccttctgtgccggtggaatgctctgttacgcccagacagtatatgatgggcgccttgcaggcgcctgcgtacatccgggcagcctgtatcaggtcctcctgacggatgtggcagatttgggccaccttctcagggggataatcctctaaaatctgttccaggatttcaaagccttctgtccgggaggatatgaaatccatatcagccaggccttccttcaatataatgtgcatcataccgttggcaaaggccacattagtgcccggctttatctgcaggtgcagggccgcgtcatttgtcaggtcaattttcctgggatccaccacaatcagtttggtgccccgcctgactgcgcggcgtatctgagtgcctgctacgggatgggcttcggttggattggagcctacaaggagaatcacatccacatcccctgtaatatccgcaatgggattggtcatggcgccggaaccaagggtcatggcaagaccggtcacagaggcagagtggcagatacgggcgcagttatccacgttgttggtgcgaaaggcagcgcgcatcattttctggaacacgaaattgtcctcgttgggtgctcttgaacaggagaaaccggcgatagcgtcattgccgtactttttctggatttccctgaactgttctgccatgtaatccagggcttcatcccaggatgcctgttcaagctgcccattccttcgtatgaggggatgggtcagacggtcgccggaacccacgaatttgtaggaaccgaatttgccctttacacacagcagattgtggttggacggcccgtcagccggttctgcgcccacgatgcggttgtccctgaccagcagatccatctggcagccggtggcgcagtgggggcatgtggtcctgaccttcctgacctcccagctgcggtactttttgtggtccttggctgacagggctcctgtgggacagtgggaaacgcagtttccgcaggattcacaggtggtctcagaccagggcctgccgtaggcagtggtgatgatggtatcaaagctgcggtccttcaggctgattacgtttctgcactgcagctcttcgcatatccgtacgcagcgccggcacatgatgcaaagctccggattgtattcaaagaatggattggacgtatcctttggggcgtttacccgctttccactgtcatagctggtatactccacgccgtattccatacagtaatcctgaagcttgcaggagccgttctgagggcaggagaagcagtgctcccggtggttgctcataaggaggtccaggacaaagcgcctggcttccatcaccttttctgagcgggtggaaatgaccatgccttcggtgcagtgctcggaacaggcagtgacaagcccttttttccgcccgccgtctacttccaccacgcacatgcggcaggagccgtcaggagccagttctttcatatagcacagggtgggtatctggattcccagcccggcggcagctgaaagtatggtggtctccggcgccacctcgcatggtatatggtcaatttcaatatgtatcctggtatccggatctatatggtgagacatgctttattcctcccgttttcatgacatgcgcaggctcccgcaggacaggcgcctccgtttatatgtgcttcaaagtcgcctctgcggtggcggagggcagacatcagggcaacattcacagactggcccaggccgcaggccgaaagctgggacacctgccgggccatgtattccaggcgctccacatccccgtccttagccctgccttccacgaaatccgtgaggagttccagaatacgggtcgtgcccagacggcagggagtgcattttccgcaggactcatggacaaagaattcaaagaccttctgtatatattccacgatacagacactgtcgtccaggaccacaatggcgccggaacccactgccagccccttaggagccagggtctcatatgtatagggtgtatccagctgttcgggaaagccgatggggccggactggccgcccatgtggaaaaatccgggttttctgcctgtagacgtgcccccgccgtatttctcatccattatcagctggcgcagggaaatgccaagtcccacctcaaacacgcctctgtttttgacatgaccgcttatggataccagtttggtgccgccgctttcagttgtgccgtaagaaaggaacttctggctgccctcctcaaggatgatgggcacgcagcacagcgtctccacattgttgaccagggtgggtttgccgtacagacctacttcggccagatgaggcggtttgattctgggacgccctgttttcccttcaatggagttgagcatggcggaattctcgccgcatacataggctcctcctccggaaaccacggtgatgctgtaatcaaagcccggaactcccaggatatcttttcccaggtatcccgcatcctctgcattttgcagggctgtctcaaaaattttctgtatcctgcggtactctccgcgtatgtagatataaccctgtttagagtcgaatacatatcccgcaatgagcatgccttctatgacgctcaggggcgtttcttccagcagcacccggtccttaaaggtgccgggctctccttcgtccgcattgcatacaatatactttgtatccccttcgatcctgtataagcttttccatttccgcccggcaggataaccggcgccgcccctgccctttaggttggagcggctgatttcttccaggatttcttctttttccatggacagagccttgcgtatgcctgaaaatcctcccagagcttcaaactcagggacagatacagggtccattctgcccacgcgtcttaataaaacagattcttgtatttccatgtaagtgttctcccccaattattgattgcgtttaccggaccttaagtcagccagaagctgacgtattttccggcggtccagattcccgtataccgtgtcctttaccttgatgacaggccctatgtcgcaggctcccacacaggggatatagtggtaggcaaagacgccgtcctctgtggtttcgcctatgcccacacccagctcctccttcagaatctgtgcgatttcctcagaacgggagaaatggcatggagtgctgttgcataccttcagcacgtacctggcctttggttctgtctttaacatggcataaaatgttatgatgtcatatacccgtgtgggattcattcccacttcctctgccaccaatgcagcagtttcctcatcaatgtagttgtagcctgaggcgttttgcagctcatagaggatagccagaaggtgttccttgtcccctccgttgtcccggatgatagccctcttttcctcggcggtcagttggctggtgatttccatgctttattctccttatgtccgttttctgaaataatgtgtatccataaagactaacctaacaaatatgggcaaaatagtcaataaaagttaaattaataacgcggaatttgttgaaaatgcgagagcggacagtgatattaattgacatttttccaagatatttgtctgtgcaggactgccgcgttcaaaatcattttaaatggagcctgactataaactttaaccgcagccgtacgataacataaatagaaataagaaaccccaaaaatcctataacaccagtgggaggtaaacaatgaggataaattttaacgcaatccagcctaaaaacaccattatcaatgcggcaagggtaaacgcctcctttgcaaagaataatagcagaaccggaaaatctgccggaaccgggcgcagtgaccgggccgatttctcgccccagggaaagctgatgagcatgatagagaatctgacaaagcagaagcagaccatcattgacagaaagaatgaactgatggagaacaccttaaaaaacggcggtaaggtggatgacatcaaggaccagcttaaaaactacggaaagcagctggccgacctggataaacagatagcaggactgtatgcccagcaggccaaggcatgtgcggaaccggatgacaagaaaaagacggacaggactgaccctcataagacggaggaacagcgcgaggtggagcgtttaagcagtctggccaatgtatcggacggtatcaggaatgctgagaagatatccgccgtaaaggaccgggttgagggtgagatgcatgtgaaggaagctgaggtcagccagggcggtgtgcatgtggatgccctggtcagcaaaggcatgggcggcgctgccaatgtggcggacatggttgacaatgagacgagcgcattaaagcggaaggagatggaaattgcggcgctgggagaccgggcttcggcccttggggacagtcaggcaaagagccttggagacagcatggatgcgctggaggagaaccgggaagcggatgatccggtaagggaagataaggcagaaaagagcagtgaagaaaacaagacggaaatccgggcagaaaacaacacaggaatttggacagaggaaagcgggaatgcaaaaaatacaggttccggaaagacggataccggaaccttagtttcatgatttacagaatggatttatcaggacagaccctgtccgcggccaactgtaaaatataatatgacaataataaccgccggagccaggaactttaccagaaaggcccacaggcgtttccaggccatgctgtggcctgaggcttcaatttcctttgaggcgttgtctgttccccaaacccatcccacgaacagacagaagcacagggctcccaggggaatcatcagattgtcagtgaatttttccatgacagcgttcatggggagatattggacgccgttggtaaaatcaaaccacggcagctttatgtccatggctccctgggacagcgaataacctgcgcttaagaatgacatgggaatcacaaggagcagggttgcttttaacctggcaaaaccgaattcttccgtaagccatgcgatgcagctctcaaggatgctgatggcgctggtcagggctgccacgaacagcaggaggaagaaggcaaaaccaaagaacacgccgccaggcagccggctgaacacctcaggaagagccatgaaagcaaacccgcctcccatgcccatggcttcgggaccagccgtaatataaaccacaggcacgatggcaagtccggacaggagggccacaaggctgtccaagatacagatacagccggcgcttttggccagattctctgtccttggcacgtaggagccgtaggtcaccatgatgcccattcccacactgagggagaaaaaggcctggcccagggcggctaccacggttcctccgttgaatttcgcggggtccactgccagcatatatttaaggccttcggcggctccgtccagggttatggcatagaccacaattccggttaagagcacgaacaggccgggcattaaaaatttactgacccgttcaattccttctgatacgccccgcacaaccacgtagatacacagaaggaggaaggcggcgccccagagaagcggttctgcaggccgtgatataaaatctgcaaaataagcggaaaatctgctgctgtcgtttccaaaggcactgaaatccgccccggtaaggtacaccgaaatgtatttcatcacccatcctcccactacactgtagtaggacatgattacaaacaaggtcaggaccccgatgcccccggcaaagctccagcgcgggttcagccggcggaaggcgcccaccacatttttctgggtgctgcgcccgatggaaagctctgccagcatgaccgggaatcctacgaacaggacaatcagcgcatagcagattaaaaacgccccgccgcctccggcagccacctttcccggaaatttccatatatttcccagtcccacagcacttcccgcagcggccagtataaaacctatgttgctggcccattggcttcttttatgttccattttcaaaacccctccattatatccatcatatatctggcatatatctacacatattcatcaaaaatcccggccatatgccgggaaaataaccttgtttattctatcacaatgccctggcaccgtctattcctttttacaaattaatacagtccagccggcctcggcagcgaatagattttttctatctgattttctgcctgtttgtttttttctatacagacagtctgtatattgacttaagggccggtgctcattataattcaacaatggttattgctgtccttcagaggaggacaggatagtgatataaaatacgattaagaaaggatacgaccacagatgagaaagaaaatagttgccctgttaatggcgcttaccatggtaccggccctggcagcctgcggcagcagcaatggcacaggcaataatactgcaggggctcctgccgaatcccagaccggggaaaccaccgcagcccaggaaactgaagtccggagccagggggagactaaggcagaaaccaatgcagaatctaaggcagaagcaccggctctgtccggcaccatgaaggtagtggccaccagcgagaattatgtaacattgtttgacaaattcacagaggataccggtgttaaggttgagctgctgtccatgtcctcaggagaggtgctctccaagctccgtgcggagggcggcacaccatctgccgatttatggtttggaggcggcattgacgcattcatgagcgcgaaggacgacggactgttagaacaggttacctttgacgcttctgcggacctggcagaggactttaaggacccggagggctactggtattccaagggaatcaccatcgtaggctttctgctcaacgacggcctcatggaggagcttaatatagaggcacctgccagctgggatgatttgttaaaggcagaatatgaaggcgaaatcatcatgtccaacccggctgtatcaggaaccaactatgctgtggtcaatgccctgcttcaggctaagggcgaagaggatggctggtcctattttgaaggtctgaataagaatatagcttactatgcaaaacgcggatccgatcctaagaataaggtgaccaccgatgaatatgccatcggaatcacatacatcgacggcaccatcgagtccctgttagacgagtatgatgtgtccatcgtttacccggcggatggtattccatgggttcccgagggagtggcggcatttaagaatgcagagaatacagacgcggccaagtactttatagagtggctgttcagcagtgacgagaatctccagatgctggcagagattgaccagaagaacagcgtaaagaccatcaagccgtccctggaaggactggacctgggatatgacaccggcatgctgatgaaggaggacctgtccctgttcggtgaaaagcgtacggaaatcctggagcattttgaggcgctgatgggagataaggcagcagatgaataggtttgacagcatccatagagatatgaatacaaataaacacggaaacatgcatggagacatgtatggcaaaagggcatcgaaagatgtcctttttggcattgcaggatatggggcggataaagtgctgctggcagttctgctggccagcgttttcctgtttgtgttctggcccatgctctgcatcctgatacggagtctgtgggacggaaagggcataagctatgacgcatatgctgctgtctggaaccagtacaggggaaatctctggaacagtgtgttcgtgggtgtctgcgcatccctgctgtgcactgccttttccacggcggcagccctgttccttgccacaagacggggagctgtcaggatgctctgcatggcgcttctgctgattaccatggtctcccctccctttgtatcctccctggcctatatacagctctatggacgccggggatggattacgtaccggctgctggggctgagctgggatccctataactgctggggagttatcctgatgcagagcctttcctttgtgcctttaaatgccttgttcctggggggaatcctgaccaaactggatggagacagcatacgggcagccagggatctgggagccagccccaaggccattttgggggacattgtactgcctcttatacggccgggaatctgggtggccctgctcctctcctttgtccgttccctggcggattttgggactccggtcatcatcggcggaaggttcagcactattgcgtcagagatatatctccagctggtgggatactctaatctggagaaggcctccgccatgaatatggttctgatgcttccctccatagctgcgtttttcctctaccggaaactgatgaaacgttcggatatgctgacagagggaagcagggggagacaggaggccctggccctttcactgggaaaatgcggggcggccgggattctggcaaacctgggaagcatactgttcttttttatgatggctctgcagtacggatgtatattcatatccggtttcctcaaaagcaccagaggtgtgtattcctttaccacccggtatctggaacagatggtccgttttgacctggacaccatggggcgcagcgtggcatatgctctcattgtatccctggccggaaccctctttgccatgctgttcgcctattacatggagcggagacagattccgggccggaatttctttgactgtctggtcacgctgccctatatgctgccgggaacctgctttggaatcggctatatcctggcctttaattctccgcccttaaagctgacaggcactgccctgattgttatttccaacatgcttttcaagcagcttcccacggccacaaagatatgttcggccaccctgacccaggtgcccagagcacaggaaaaagcagtgcgggacctgggcggggggcagatgtcggtgctgaagaccgtaatactgcccggtctcagaccggcctttctcagctgttttgtgtataacttttccagcagcatgactacggccggagccatcctgttcctcatagatccgggccgcaagctggcagtgttcaagctttttgatgcggtttataccggagactacgccttggcctccctgatagccaccagcatcatcctggtggtgctggcagtggaaggcatggcttatttaataacatggaaggcaggtaagcgacgtgtatcttgaacttgaccatttgaaaaaacactttgacggcagggaagtggtgcaggatttatcccttaccctggaacagggccagcttctgtgcatccttggggcgtcagggtgcgggaagacaacgaccctcaatatgataggaggcttcctggagccggacagcggcagcgtgcggctggatggccaggacatcacccgtatccctccggaacagaggcctgtgacaaccgtcttccagtcctacagcctgtttccccacatgacagtgctccagaatgtggtttacggcctgaaattccggggagtgaagcgggaacaggcccggcagaaggggatgcgttatcttgagatggtgggacttgcagattatgcatcggcctatatccaggaaatcagcggaggacagcagcagagggtggctcttgccagggcgctgattgtggagcctaagctgtgccttctggatgaacccttctgcaacctggacgctgccctgcgcaccaggatgcgctatgaattgaaacggctccagaaagacctggggctgaccatggtgttcgtcacccacgaccaggaggaggccattatcctggctgaccgtatcgctatcatggaccagggcgagctggtccagaatgacgcgcccctggacctttgccggaagccggccagcccgtttgtggctgaattcatggatctggagagcctggtatggacagaggacggcaggctgcttaaaattatcaagagataggaggaacctaaatgctggttgacatgcatcttcatgagtgtacttattcaacggacagcaaaataagtctggaggaaattgtgaccacagcgcggggcagggggctggacgctgtctgcatcacggaccatgacagcatgggactcagggaatatgcggcagagtattcagacaggaccggttttcccatttttgtgggtattgagttcttttcccttcagggggatatcacggcgtgggggattgaagattatcccggctgccgggtggatgcccaggattttataaaccatgtaaatgaggccggcggtttctgtgtctcctgccaccctttccggaacaataaccgcggtctggaggaaaatctccgcgcggtcaaagggctccacggggcggaggtgttaaacggcagtacggccctggaggccaaccgcagggcattctcttactgccgggaattagggcttaagaccataggggccagcgatgcccacaccatgggccagattggaaagtatgccacatggctgccggagaaggtagactgtctgaaggattttgtggaacagcttaagaccaggcaggtgcgtccggcagtgtggaacggaagcagctatgatgtggttgatgtgttataacagatgccggttattagtggattgcttttcggttttttctaattgccgcttttttgctttaaaactttgactaaatggtgtaaatggggtagtatattaaagatggcgttgcaggcagtcctgctccattttcatgcaggaccgcaggccgtctaaatgtatgtcataaaggagaagttatgaacaagcagaaaaaaacggattcctcaccggcagccgtgcaccagaacggcggctttggaagcagcctgggatttgtgctggcctgtgtgggttccgcagtgggaatgggcaatatctggatgtttccgtaccgcgtagggcaatacggcggcggcgcgtttctggtgccctatattctattcattgtattattcggcctggtagggctgtcggctgagtttgccattggacgccgggccaggaccggaaccctgggcgcctatgaatattgctggaaaaaaatagaaaagggcaggctggggtatttcctgggctggattcctcttctgggttctttaggtatcgccattgggtatgccattatcgtgggctgggtggtaagagccctggcaggatctgtaacaggggctatccttacagcggatgcagcggcctatttcagccaggccacaggtgagttcggaagtgttccctggcatgtcctggtggtggtgactgcggccggcatccttatgtttggggcaaccaagggtattgagaagattaataaggtcctgatgccttccttttttgtattgtttgcaatactggccatccgtgtggccttcctgccgggggcggcagaaggatataaattcctctttgccccggactggagtgatttattaaaggtggatacctgggtcatggcaatgggacaggcatttttctcactgtccatcacgggctcgggaatgattgtgtacggcacctatctggccaagacagaggatatacccaaggcatccatccgtactgctttttttgatacggtggctgccatgatggctgcccttgccatcatgcctgctgtatttgcattcggcattgaaccaaacgcaggcccgccccttatgtttatcaccctgcctgagattttccggcagatgcctatgggaaggctgttcgcagtgatattcttcctgtccgtggcttttgcgggcatcaccagcttaattaatatgtttgaggccgtaagcgagtcatggcagaaccggtttaagcttcccaggaaagcggccgtggctctgtgcagcggcattgccctgttagtgggtatttttctggagtcagagcctaaggtgggttcgtggatggatttcatcaccattattgtggtgcccttcggcgcagtgctgggggctgtatccatttattatattctgggatataaggagatacgggaggaactggaggaaggcaggaaaaagcctttgggagagttcttcggacctttagccaggtatgtctatgtgccgctggccgtgatagtgttcatactgggaattgtgtatggcgggattggatgattgaatgtgcctgcacctgcagaaccccggcggtattgtatactgacagaaaacatgatggaaaaaggcggtgtctgggtgagacaaaagacagagacgctctcggagcgggtggccgtgaagatacggcagtatattattgagaatgaaatgaaggcgggcgataggcttccaaatgagctgcagatggccgaatactgcgaggttggcagagggactgtccgggacgcggtaaaactgctgcggtttgaagggttggtggaggttgttcagggcagcggcacctatcttttgaggcagaagcaaaagcccattgagatcagcgggggagagacgccaaaccttttgggagcatttttgccggaagagctgccaaataaagcgctggaattttcagaagtaaggctgatgctggaaccggatatcgctgccctggcagctaccaacgcgacttatgaggactgccggaaactgatggagctggaggcggaggtgcgctggcagatccagatgcaggaatcccattatgagaaggatatagagttccatcttcagattgccaggtgttctaagaatgagattgcctgcaagctgatggagattgtagtcaagggaatccctctgttctgcaaggtcacaaatgacgagctggcaaatcagacggtgaaattccatcatatgatttcggagtctatcgaacggggagatgccagtggagcccgttacagtatgatcgatcacttaaacagtacccgaagaaagattattgaggagattgaacagcagaaggcgggaaagtcatcgaatgacttttaaaaatattgtacaatatacacaataaatatctgcaaatatagaaacaaaatccaacatatcgacaaaatatatccgatgtgctacactgcattcgtcggatatatttttttgtttacagaacaatttagaaaacggagggaaatcagtgtgttgaaaagaacgtatttattatcaggaattgcggtactgacagctcttgggcttatggcctgcggctcgtccggcagcggacaaacagaggcaaagggaagcgtttcgggaaacagcgggacggaagctgctgccaatgaagaatctctgaatttcacaatggcattggtggataattcccagtcgaattattacaagggagcagaaaagattgccgagctggtgaatgaggccacggaaggaaaaatccagcttaccatccaggcaggcggcgttctgggtggagaggcagataccctggatatggcgatccagggcgatctggacatcgctacctgcgctaattcggttttggccaactatattccagaaatgtctattttagaccaggcctttctctgggacagcgcagaccaggctaattacgcggtgcagaatgagctgggagatctgatttctgccgaggcggaaaagcatggccttcacgtcattggctatttagagtcaggatttcgggatgtgttctctaagaaaccaattcagaccccggcagattttaagggtgtaaaaatccgggtgatgcagaacgagggccagctggcggcatttactgcctttggggctaatccggtggccatctctgcctccgagcagttcacagcgcttcagcagggaaccattgatgcctgtgagaatgcagtatctaactgctggattaataagtattatgaggcaggagtgaattcaatcacgaatacaaagcactgctttgtctacattccgatctgtatgagcgacaatgcctggaacaagattcctgaagatatgagagagccctttgtcaatgcggtacaggaggggtgcaaggcccagtggacctacctgaatgaggctaatgcagaggcagtggaaaatttagagggtgcaggtgtgaccttctatgatattgataccgaggcattaaaggcagagtatcaggcggcccaggaaaagaatggtgcttcctacgacgagaaatgggcagcagctgtcgacgcagccaagagtgcggtacagtagaaacagaggagaggattcgtatgaaatttatgaaaaagcttctgtcatgcgttacatcggcagagtatgcagtcatggtcgctgcttttgtggccatggtcgcttcctatttcatttctgtgctgaatcggaattttatccaggcctccatgccctggacagaagagatagccatatacagcatgacctatatggcactgctgggaacagaggtgggtctaagagatggcacccaggtagcggtgactgccgtggtggacaaactacacggtgtggcccgcaagattgtggatcttatccggcaggtgattctggtgggatttgcttttatcatgattaaagcgggaggggccctggtcttaaagcagcttcaagccggccaaactacgcctgtgatgaagcttcccatgtctctgatgtatttctcgctggtactggccttcggacttatcttcgtcattcagaccattacgctggtacagcagattgcagaattcggaaagaaagagggaaacaggacatgaatgcaggattgattttatttttgatttttattctttgcctggtaatcggggtaccggtgtccatctccttgagtgtggcctctctggcggccgtggtgttcgggggccttccggcctcctccacggctatcgcccaaaggatctttggcgggctgcagtccagctctatcatggccattgcattttttgtactggctggcaatcttatgacgaagggggggatttccaggcggattgtagattttgcggactgcctggtgggcaacgtgagaggcggtatgagcctggcgctggtactggcctgtgcattctttgctgccttatctggatcagcccctgcaacggtcattgccatcggaaccatgctctacggggatatgatcaaaaagggttatccagggccgcggaccgcaggacttctggtagtgtccggtgggcttgggcccatcatcccgccatctattataatggtgatttactgtacgctgaccggtgcctctgttggaaatatgttcaagcaggggatgatgattggtattgtgattatgctggtactgatggtggaggtactgtggtttgcccataaggaaaagtggccgaaacagaatgtgaagcgcacgcccgccgaggtggtgaaggtttttctggacgccattccagcgctgcttacacccattattattctgggaggaatctattccggtatgttgactgccacggaaagcgctgcggtggctgttgtatgggcagctattgccggagcttttatctaccgtgagctgaatctgccggatacaatccaaatcatcaaggactctgccaagagttctgctatgatcctgttcatcatcgctgcgtccacagccttctcgtgggtgttcacaatctctggcgcttccaaggccctggtggatacggtgattggcatgaatttaaatgcaacaatgttctgcctggtggtagcagtgattcttctgattttcggaacctttatggaggggacagccatagctgttttgttagttccggtattgtggcctatcgctcagagcatgggcatcaatgtagtgcattttggaatgattgtgtgtatttccaatgtagtgggaactatgacgcctccggtagcggtgaacatctactcggcggccacagtgtcaaagctgaagatgggagagatcgcaaaggcggagattccatttttggttggctatgtaggagtattttttctgtgtgtcttttcagaatggttttgtacgtttctcacctaaggaggtttgattatggtacagggagttgtgacaagggaacggatggaaaagtggaaaatcgtttcccctgaggaatatggatttcataaagtgatcgtacctggcagggaggactgtcaagtggcggtaatgtaccggctgaacctggcggcaggccagcgttatgaactgaagcctggcggcgaggagatgaacggtgtatgcattaagggagcggctggactggagctggctggccatcaatatcactgcggccggcttgactccttctacacggcgggaggaaacagtgtggccatcgaggcagaggcagactgtgttttttacatcggggcctccgtggatgagggctatggaacaccgtttttccgtgcttttaatctgcatctgcctttgggtgagattcatcagattcacggaaagggcgtggggcagagagaggtttttatgacgctcaaccaggagattcaggcttcccgcctgattgccgggctgacctggggaggcaacggtgcctggaccagttggccgccccaccagcatgaggcagacttagaggagatttactgctattttgacatggatgagcctcattttgggctgcacctaagctacaccgccccgggggatgtagacaatatcgttgcacatccggtgaagagcggaagcatggtgctggcacccaggggctatcatcctacggtggcttccccggggacacggaatgcttatttttgggtactggcagcccactcacatgagagccgcggttacgatctggcggtattggatcccaggcgggaacagatgaactgaaacaagaaaggtgaaaagaccatgaatcaatatcattccatttatctcccccagtttacgatgggcgaggatgcctttgggacttttccggagcgtataggcagggggaggaaggcggccgttatatgcggcaaacaggcatgggaggcttcaaaagattatgtgctcccgtccttggagcaggcagagattattgtgacaggggcggtggtttacggaaaggacgcaacttgggaaaatgtgaagcggctggagagggaaccagcagtccaggaggcggatgtaatcctggctgtgggaggaggcaagtgtattgacacggtaaaagtggtgggtgacaggctgagtaagccggtctacacaataccctccattgcctcaaactgtgcgcctatcacgcagatcagcatcctctaccatgaggacggatccttccgggagattctcaagctgaaaaatgttcctgtacactgctttatcaaccccaagctgaccctggcggcgccggtgcgttacctctgggcaggcatcggagacgctatggcaaagcacgtggagtccgcctggtctgccaaggccggggaagccctggattatggcagtgctctgggaattacagcaggcagtatgtgcttttatcctatgctggagaaggcggagaaggccatggaggatgccgcaaaaggagtgatcagccgggagctggaggagacgattttaaatatcattatatccccgggtattgtttctgtatctgcccatccggattacaacggcggtatcgcccacgccctgttttatggcatgaccagccgtaagtgtatcgaggagcggcatctccatggagaggtggtcgcctatggaatgctggtcaacctcatggcagaccatgactgggaaaagcttagcagggcctggcggcttagcaaagctattaagttgcctgtctgcttgggagatctggagctggatcccaccgatccgctggaggatgtgttgaaggtgacgatggagaatcaggagttaaagcatacgccgtatccggtaacaaaggagatgatccgggaggctatcacggcgttagagacttatcaggcataaggagaaagcacagtggcagtggcaattgagaatatcagagttatctgtacggcaccagaggggattaaccttctggccgtgcgggtggacaccaatgtgccgggcctttacggcctgggctgcggaaccttttcctatcggcatctggcggtgaagctggtggtggaagagtatctgacgccgcttttaaagggaagaaatgcggaagatatagaggaactatggcagctgatgtatcagaatggatactggcggggaggtcccattgaaaacaacgcgatctcgggaattgatatggccctttgggatattaagggaaaattggctggtatgcctctgtatcagctgtttggcggcagggtgcgcgagggagtgcctgtctaccgccacgcggatggaagggatttggaggagctgtgcgaaaatattgagaggtaccgggaactgggtatccagaatatccgctgccagtgcaggggatacggaggggaacgttacgatgtgattcctgaagccgccccccaaggtgctctgccaggagtttacctggatggggcccgctatgtgcgggacacggtaaagctgtttgcgggaatccgggacaaaatcgggtatgacgtcaagctgattcacgatgtccatgagcgggtggcaccgccggaagcagtgaagctggccagggagctggaaccctttgacctgctgtttttagaggatccggtgtgtgcggagcaaaccaagtggctgcgggaaatccggtgccatagtggggtacccattgcacaaggggagctgttcaaccgctctattgactggcgggatttgattagcgggcatttgatcgattacatccgggtgcatataagccagatcggaggcatcacgcctgcgcgcaagctccagatgtttgcggagcagtacggagtccggactgcctggcatggtcctggagatatgtcccctatcgcacatgcggccaatgtccatatcgatctggcggctaggaatttcggggttcaggagtggtctggcattgagccgcccaactttgtgatccaggatttaaagggtccgaaaggtgcgcttttggaggtgtttcccgggcttccggaatttagggacggctacgtgtatcctaacgaaaggcctggtctgggggtggacatcaatgaacgggaggcagctaagtacccttgcgagaacacggtgaccaggtggacccaaaccagaaaccgggacggaagcctccagacgccgtgagaatatagattataattgatgaggagtgtaaagaaaatggtatacgactataaggaaaaattcagtgtccagggaaagaagtgcattgtcaccggcggggcacagggcctgtccagaggtatggcagaagggcttttggaaaacggagccgaggtggttttgatggatctccagaaggagaagctggaacaggcggtggaagaatactgtaagaaaggatataaggcccacggcgtagccggcgacctgtccaaaaaagcagaactggaccggatgttcgatgaggctatggaactgctgggaggtaagctggatgttatgattccggccgcaggcatccagagacgatatgagccatgggagtttccggaggagatgtggaacctggtgattaatgtggacttaaatcatgtgtggtttatgtgccagcgggccattcaggtcatgcgggacaaggacaccgtaggcaagatcatcaacatcggttcgatgaattccttctttggcggaactaccgtgccagcgtattctgcggcaaaaggagctgtgactcagctttccaagagtattgcctccgactgcgcggatcacagcatttgctgcaatgtgatcgccccaggctatatggatacggagatgtgtgctaatatgagccaggagcgcaaggacgaatgtacaaagcggattgccgcaggccggtggggcagacccgaggacttaaagggtcccatactgtttttggcttcctctgccagcgactatttaaacggcgcagttatccctgtagacggaggatttctggtgaagtcatagaaagcggattaggcgaatttaaaagtattggaaacatgaaatgagataaccgaaagcaagaaagggctaacgctttagtgcattagcccgtttttgtctgcaaaagagaaaaacacaatgaaagacacgttttcatggccgcttatcccgtcccggccatttacacataatctgtatgataaatcaaaacctggtcaaacacatccttatccctcatgatacacttctcatttcccactgtgacaatggcgctgcgccccaatatcctatcaatgaccagggcggcttctttctggtggcagagggccgcgttcctgatgtctgaaatcatttcgtttattttgcgggtatccatgttcaccatgtccctgcgcatgtgccgcatgcgggtgcttaaggttccggagggcggaagggcctgggcataggcgttcaggatgtagccgtccagttcttcatgggtcagcggcagttccatgagctgtgcgccggttgccaggaacagctttatcgtactcctgacttccgggtcagcggtactccagagggagaaatagcccgcaggaatataaaaatcaataccgctgtcataggcgccgccctggtagcggatggcaggttttaagtatttatctgccgccgccatgagaaagggaagataacgccccttaaagccgggatttccatggaaatctcccatgagccgtgtctcctggcaggaggcttccacgcacacggccagtttttgtctctggtccgggagccagacggccggagcaggagagctgtgcccttccttaaaaccgggaagtctcccaagtatatccacggcagtctgttccagagtacctaatacatccggtgaggcggctgccaggaataccagaccccggcggtttaatatggtatgggaaatggtttcaagtctggcagctgccgcagccccgaaatcaggatcttcctttaaccgattcaggacatccttcagaaaatagtaattttcctggctgtttaacatattgcggaacctgcattcctgcctcatatagccttcggacaggctgaaggccagggcagaggcattgtccgccttggactggtcgtagtcaggcagatacttttccaggacctgtatgatggtatccgtgtcgctgtagtccccgccgcccattatatccagaagaaaatccagtcccgcctcaaagtccccggtcagtccgtaccagaatacactcatcatgggatggttcagagcccctgcctcctttggggggtacagctcgtcaaaggtacagtcatgaaggtattcctgctccaggttcttctgctgttccaccgtaaagcgctttgtgtccagttctgtgagaagcatctgatagagggtgaggtaattaaggtcgtccttttctatgccgctaatgtcaaagtagagctggtagctgcccacgtcccgtgagggggcgggagatgtgtagcatgtgatggttccccactgtctcttggtaaacggacatgattcagacggctcaggaagctccccgggccctatgagaaagtccatattgctacgctccctggaattccagtcatggaaagcagctgtttgttctatcagctgtttttgctcagccgcagtcatggaagccagtttttccttaaggtattgctccttttcctcctctatctgctctgccagacccggaactggttcggttacgacaagggcgctggctgccggttgaagggcagaggcagccagcttctttatgatggactggccggaatcttcctcaaagcgccggaaggcttcctcataaagctgaaaatagtcggtccggcctgtaatgctccagtaacgcccgatttcctcagacaggttaaagcccagatggggggcttcccgggtaagggagtcggagaggcggttttccttcatggaagcccggtacagctttggggacagcccattgcggcttatatcctccagggcttttttgatagagcctaaaaaggcctccttcagacaggaatccccgttgcgcaggcggaattttagggagggatggggcagcagagtatccagatagacttccatcacatggttgattcccatttccctggcatacctgtgccagggagaggtatcgttatccaggatatccgcaaacaagtcccagtatatgagttcctcttttgtacagtccgacaggtcgataccgtagtccatgacagaggcgtgttccgagggactgccctggtaagcgggactctgtgctgtgcaggtgcgaaaacctggttttaccggttcttcaaactcaccgaggaggctgcggccttttgacgccgctctggagagatgctctctgtccagaaaatgcagtacggacctgtaatccatatttccatatagggtaatcagacagttggagtagctgtagcaccgctcaaaggtttccctggcctgctcataggacagttccctgtaatgcaggtgggcccgccccagcaggttggcggtgcgcgtgtcctggtaaagggtatgggacatggcgctgtctgcattttccaggatgtcggtcagatggccccagtcctcgctgagcaccgtgccctgcatggtaagggggcccctgggggatgagagctcataccgtatggcttccctcagataaaaatgtttgtccttcagggcatccggttcctccatgcagcacaggaatacatccatcagttttaccagctgttcctggctctggctgcacaccgggtagcaggtgaaggtattgtccgtaagaccgttcataaaggtagtataacttttgctgtccatgtcaaagaagatatccctgctgggatacttttggcaggaggacagaatgagatgttccagtatatgggaattatcccgttcatccagctgcggcgtccggtaaatcaggttaaaacccagttcccggtcatcgttctggatatataaaagctgggcgccgcttgattcatgattaaacagaacggtcctggcgcccagcatgtgtatggttccaagttcggtgacggtaaaaccgcttatggtttcgccaatccttggcagtgatgccatggtaatcctccttcaattgataatcgtcctgataaaacctttctatactatagcatcaggcagatgtattttgcaagaaggagcgtaaatttatgaaaatgtgttcccgttccacaagcaccagggccagcaaaagaggaaggaaattgagccataccgagaaaattccaaagattttagtaaaataccagcacagggccacacctatgtggtagaaaaacagggtaaagccgtagacccatgccttttccagatgctttttattcctgtccgcaaaataatttgacagggaagaaatgaactgtctcaggttattggtggaaaatatggtggagctggcatagccctttacgccggtaaaggaacaccattgaaaggccataatgaaaaatacgggatagagagccatgagcgggtccatgttcgctggaaaaaagcccaggacagcaatcacgggaatctcagccagaatacatataagccggatgtctatggatatgagacggggaatgagagtggcggcaatgatggctgtgataaagataagaagagaacccagcctcagaagcaggctggtccaactacctgatgacaggtccagaatggagtggatcatattggcggtttgggcggatccgaaaatctcgcaccggttaagaagggcgtaggcgcccatgaaacctcctgacagtgacatgatatagtgaatgtatgcttctgttcgttccttttctttcacaatgaaatcctcctgtttgctcagcctttctattgtatcatattgatttaccatattaaaatacatataatatatgtagtataatatcaaaaaggtatggtaaaagatgatggatctgaaggatttacagtatttccttgctgtggcccaggcaggcacgataacaggggcagcggcaaagctgtgcatggcccagccgccgctgagcaggcagatgaaggagctggaggaagaattagggacaaccctgtttatcaggggaaagaggcatatccgtcttacggaggaagggatattcttaaggcagcaggcagaggagattctatctctgatggaaaagacaaggggacagctctccagaatggggaccggggcaggcggacttatttccatcggggtaacggaatcctgcggggcaggggtgctgtcggatataatagagagatttcacagcgattttcccggaatccggtataatatctggtgcgggaacggggatgaaatcaatgataaactggacaagggactggtggacttaggaattgtgagggagcctttcaggactgagaaatacgaaagcgccctgataaaaaccgaatcctggacagcccttctcagcagggaacatcccatggcagaacagccgggagacaccatactgctgtccgacatagccggcagtccccttattattccctccagaccgcctctgcaggaggagatacgggggtggtttcaccggattgagcgggagcatactattttgtgtacctataataccctctcctgtatcgtgcctttggtggagcgcaatgtggcggtggcgatctgcccggaggcagtgcggtactttacagaccggcagaggctggtatgcaggcgcctgacagagccggagcatgtgtccagacttttgctggtgcgccgcaggaatcagctgatgcctgcggcggcaggatgcttctgggattttgccagggattactgcggctcctgataccggtccgcaaagcacagtctcggcaggcccataagaggggcggctccggccagggtagtgccgtagaacaggattttttccttaaatggaagaaagtccacgatggatccgttacagacagtgcttcccgtgcacagaaccaggtctgccttacggcacagggactggctggtctcagggatgcgtccgtcctcaataaggaccccgaaccgtttctggccgatattggccaggcttaaatccgctgccctgacatcatattcctttgcaagctgttccagcatggcgggctggtatcctatcagcgcaatggcagggcggccgtagtgttcagagatataacggaccacgtccatggcgcaggactcaggtccctcattgcggcagtggaccgtgcagtccgccctgcctgagtgtttcatgacagcgtttagggcagctatgaacaatccgcggctgtaggggtcatctgccaggtccagggagcatatttcttccaacgtgccgcgataagcagagggggcgtcggtaaacgcctgtcccagggagcccatgcattctgcctgaaccatcacatcctttcccgttatgatgggaaaatcttttcgttttgtaatgccgatggcttcctccggcgtgagggactttgtgttgattaccacctgctcgcccagaattccttcctctgtcagaagcttcatgaaacgcaaccttaattcgctgtaaaatgacagcgcatcattcatatatgtcattggacaatcctcttttcctgtttgcgcccaggcgcagttatgatttgatttcttcccagaaaccgctccacctctgcggaaaaatgcccgtccatcagccgggaggtgtcggtgactgtctgcagcttcccatccagaaggatggctgcccggcctgcaagagtccgggcttccagaaaatcgtgggtgacgaagatgatggtgcatccaaaatgccggtgaatccggcgcagctcctgatacagggactgccgggtggccgggtccagggctgaaaacggctcatctaacaaaagaacctggggagccagggccagggctcttgccagggctgtgcgctggctctcgcctccgctgagggttccggggtactggtcccctatgtgggaaatggacagcatttccataagctcctgtgcgcggctgtcctgttctttttttgaatatccgtgcattttcagtccgtaggaaatattttcctttaccttcatatgagggaacaggccatagtcctgatacacaaggcccagctttctctgactgggaggtatgtcccgtatgtcggttccgtcaaggaggatgctgccggtgtcaccgggaaacatgccgctgatggcctccaagagtacggtcttgccggaacccgtgcggcccaggatggcaaagatttcccccatttggatggtaagggagatgggagacagtgcaaaactgcctctttttacggaaaaattgttgataaccagttggttcatcgtatgaacacctgccttttgtttctgtccgcgggactggcaagcagacgggagagaaagagagtcagcccggaaattatcagcatcagcatggcagttgccatggcggcctggttgtcgccggtggatatgctcagatagatgctgccgggcagtgtttccgtcttaaaacgggtaattcccaccagcataagggtggctccgaactcccccagggccctggaccaggtcaggataaaggtgcttacaaggcttctgcggcaaaggggaagaagaatggtcagaaaacatctccagggggaagcccccagggtcagggcaatgaattccatccgctggtcggatgcctcaaaggcagtgcggatgagccggatggcataggggaggttgaccaggatgtgggccatgacaatgcccgcgggagaaaacaccaccttaaagccctgttccttcagccatttgccggctggtgatgaaaacatgataagaaggctgagcccgagaagcaggtagggcagggacaaagtcagttcgatgatgatgcccgacagctccttaaagggcatggaggtccgggtcagggcatatgcggtgggaagtgccagggccatcacaataagggtggagagactggcggtggctgcgctgagacgcagggcaaagagcacttccttctggcggatggttccggcaaaggcgggaatccctccggctgcaatcgcgcagaccgcgctgccgatgaaaaaaatcaccagcagcgccacagcgaccgtcatggctgagaacaggtctgttcccctatgccccctatgcctattctgcaatctcatatccatacttcaaccatatttcctgtacgtcccctgaatttaaatagtccagaaatgcctgtctggcgtcgtgatccgcggagcagcttaaggaagccgcgggtatggtttttatgtaatcttccaaaccgctgttatctacaatttcaacgccctgagcatcgcagttttctttccagataatggctgcgtcagcctctcccgcggcaatggcggtagccatctggggagccgtggcagtggatgcctctatctgtaccttgtcaaagatacctgcatcagtcagggcctttttggcaatcttaccaatgggagtggagtctatatcgccgatgataagggacacaccctcttctgccagaccggccagggaagtaatgtttttcgggttgccgctctgaactgccagcacaggtatatgttttaccagtgccttgctttcggatacataggactcaactggtttcagctcctcggctgaaccggctatgaacatgtcgccttcttccgaggtggtaatctgggactggatttggccggcattggcgtatgtcacgttcatttcgcagccggtagcagctttaaagctgtcggcaatttcctggaacggctttgtcatgccagccccgcagtagatcatcagggtatggcctgtcaggtctggggtgtccggggctgatttgccggcatcgccatcctccggggctgattccggtgtctgctgcggggcagaggaacgggcggtgccggaggatgcggcgccgcagcctgtgataagggcagcgcctatggcgcctgccagtaaaatccccaatacatttcttttcataatacgtctcctccatctggataattatagtaaacctatcatataatggaaaagcgttattgtcaagaaaatataacggttaatatttcccgctgaccgggatttctgtttattgttcagcgcttttttgtatgtctccatgttcaagccggcagaccacgtcccctgtatggcttataaaggtacggtcgtggctgatggccagcagtgtcccgtcgtagctctccagcagatgttccaggccctccatggtatacacatccatgtggttggtgggttcgtccagtatcatgaagttgcagcccgataccagaaccttggccagggcggtcttgaccttttctcctcctgatagtacactgaccggtttaaacatatcgtcctttgtcatatagaggttggacaggacggcccggcagatatgctggggataggccgcatcctccgacacattttccagcacggttttcttcgggtccagggtgtccaggtcctgggaaaaataggcgactcttgcttcggaggtaataaaggtttcgggtgccctgtctatcagggctttgattagcgtggactttccggccccgttattgccggtgataaaggtccgcctgccagcctctatttccaggctcacgttatccaggacaatgcgctccccgtaactcacggtgagatgccggatggcggccgcattttttgcccttatttttcctgcatccggcagtttcatggacacctggggcagctcatccgggcgttcctttttctccaggtgctccagacggctcatgacagcggttttgttgctttggacatgaccctgctgaaccgcggccacgcctttgtagagcatccactcgctgctgcccatgcgtttgggcggctttgtcattgtctggctctttctctgcaatgcatcggtagttctctccagccgctttttctccttctggtactgctggtattcaaactcctggaagccccgttcccgttccttttgggcggcccagtcggagtaatttccgtcaaaaacgcggatgtttcccttgtccagttcccatatctgattgcagacccggtctaaaagggtcctgtcatgggatatcatcaggatggcgcctctgtatcccttcatcatcttctctaaaagctccacgccttccatatccagattggtggtgggctcatcggcaaagagaaggggcgcctggctggaaaatgctgccccaatggcgcgcctggtcttctcacccccgctttttaccgcgctgtcgcgcagctttaattggcttaaaagcctggcctcgggttcatcctctgtttccccggtctggaggatctcagcaatgggacaataccgttttaccacgccctcgtcgcaggcgattctcccggataggacgcctaaaagggtggattttccggccccgttgcgtccgatgagtccaatcctgtccccgtcccggatttccagtttttcaatatccagcacggtctggattccatattcttttttaacattcagtgcatttaacaacataaaaaaatccctcctaaacgcacttcgttcagaagggatataaacctggccagttgtaggcagaaggagcgggaacgtacaggtcaggagcagcttacgcgcgcctgccgggacatgcctgtccgctgcagcggatgcatatggatagacagatgcaccccgttatataaaaatatggccttatggaatatgattccctgtatgactgaacgaaatgacaaagacacacaaattctgcccggcttcctatagccaggaaagagagtgtgtaaatcatctgctgctgttcaatcatctaataatcatatttcagttagccacctttctctttactatattgtacttatatcgtgtattgcagtcctcagaccaattctgattataggggatgggaaatataatgtcaaggtggaaaaaattattttatctgcatattttgtccgcagccgagtacgggctgaggtttggtctgaggtctgggcgctcagggcctgtggcctccattttgacgcctgcatttataaaataatcattaaaaccctgtctgtacattgctttcccatgagaattaggttatagttactctcggatgaatgatccgcggctgcctgagaaatatacctggcagcaggcaggacaatggggaaaggattgtttgcagatgaataaaatcagagaaaaattacagcgtttcatgataggaagatatggtatggaccagcttggccagtttataatgtataccgtgcttgtgttgattttcctgaacgttgttgtcagggtgaggatattgtcctcattcctgtatatcctggagctggcaggttttttcttgctgtacttccggatgttttcaaaaaatgtgggtaaacgctaccaggagaatcaggtttatctgcgcctgcggttttatgtgacggaatatttcaggaaaatcaaattccgtttcacggagggccggaaataccgcatctttaagtgccctgactgcggacagaaggtgcgcatacccagggggcacgggaaggtcagcgttcactgtccgaagtgcgggacggattttataaagaagagctgacggttgcagcacgaaaccgttatataccattgaattacataaaagcgcgtctgaatgtggcagcaatgcatgttcaggcgcgccttatttattttatctgatcaggaaggcaggaatgctccgtaatggccggagatatagcgggaagccccctgccagtccctttcctcaaggaaatgatggggaatcagactgcttccaaggccggctccgataaagccatgctcaaagaaggtgtggagattatctccgcggactccacctaccgccacgtaatccgtatcctcaaaggggcccttcaggctcttgatatagctaaggggaagatcaccggcaggaaacaatttcattatacgatagttatatttaagacatagtgccacatcagatggtgtcatgactccgggaagcaaatccaaatccttttttctgaaataccgcagtatagattcgtcaacagatggcgtcagaaaaaactgcgcccctgcatgcaaggctgaatcaatacgctctatggtagtggcagtaccggctccaactgtaacggactctttgaaatgttcttttaatgctgaaatctgtcccgctccgtctggggtattcattgccacttcaaaaacgctgattccgccccggagaatactttcagcataaggaatcagtaaatcttccgggagatttctgagtatggcgacaacaggacattgattaagaatatgcttcatagactggcctcctttgtgttatcttgtaatgggtgatatatgattttgaatatcaatcagttctttttttgtcggcagcccctctatatcaccttggacctgtgtgcaaagcgcaccggtaatcccgcctctctggccgcagtccttcaatggccttccatccagaatgccggacaaaaatcctgcattaaatgcatcgcctgcccccaccgggtcaatacagacacagggatggggagggatataacagtcttcatttattgaatatacataggctccggcgctgccgttttttagggccagatagtctgtgcagcctgatgtgaaaataatatctcttaatgtttggggagtccgctctccgtataacagctgtccttcatccaagcccatgaatacaatatttgactgggaaatgaattcttttatcaaatcccggtaatcctcctgtttccagagtttcatacgtatgttagggtcaaagctaattcgtacattcaatgaccgggccagctcgaataccctgcgggtcaggcgcaggcaggactggctcagaacaggagtaattcctgtcatatgaacaattcccacatcctcaaatgatttttctgatataagagtttcattcatttgcgaagccgctgaaccggaacggtaatagaatacctctgtctccgatgaggggttaaagcgtttggccatcagaccggttggggcatgggcatccagcctgacatgagaaacagatacaccttctgcacgtattcgtgataaaagaaatcgtccaaattcatcgtctcccacacagctaagccattctgtctgatgcccaagcttgctaagaccgatggctgtattgctttcggcgccggcaaagcaaagacggaagtgattgatatactgatagggacctgtttcagagggaaccatgacagccatggtttcaccgattgtcagaatttttggcatatatttacctcccgatgtttattccataggacggggtcggataaaggcagaccccgctatagccgaatttatgagaaagcccgagtgcggaactggtaatgagctggctgaaaaagctcaggcgctcgtcagttatggaagtataaatagctgaaatactgatggctcccatgcaatccccggattggttaagaatcggagcaccaacgcagaataccgcttcattatcttctctgttatcaatggaataacccctctgtctgatttgttccaaatcttccattagttcatcaaaagtggtttttgtattactggttttcgcggtcagccttcctccgcctgtaatctggcgtattttttctattggaagggttgccagaatggctttccccaaaccggtactgtacatatcatttctatctccaatcacacatgtggttctggtaggggaactgccttcctctttgtcgaggtatacaatcatcccgttgttttccactgcaagaaaggtggtctccccggtctgaaggctcagctgtttcaggacaggccgtgcctgggtatgtatatcggttctgctcaggtaggtgctccctatttcaaaacagtgtacatctaaagaaaaacatttggtatcttcatccatctgaaccatttctttatgcaccagcgtatggatgatatcaaatacactgcttttaggaatacctaaatctttgcttattgcagacagagtgaccggttttttactatgtgacagataatccaatatatcgatcgatcttaaaacagctttatttaatttttctttttccataaaaaactcctcttgcgtccggtattttaaatgcgcgtccgatattacgaacagcttactgctgtaattgtaacatattcacgaataaaacgtcaatattaaaagtgccaaatatttaatattactgtctcaatatttagaataccagggaggggttgtaataaacgtgaaaaataatggaataattcatgaaaatttgtttaatatgattgacatgggaaatcaatgttgctataataaaaatgcgaacaccgtccgtaatactgaacaatgagattacaggaggagagaaaatgaaaattacaaagctggagacctttcacgttaagcccaggtggctgtttgtgaagatctccacagatgaaggaatctgcggctggggagaacctgttttggaaggaaagagtacagtagtggaggaagcggtacatattctgggagatgcgattcttggtaagaatccgcttaatattgaacacttgtggcaggttatgtaccggggatctttttacagaggcggggcgattctctgcagcgccatcagcggaattgagcaggcactctgggatataaaaggaaaatatctcaatattccggtatggcagatgctgggaggtaaatgcagggacagaatacgtatgtatgcccacattactcctaacgtggaaaatcctacaatccaggaagtgtgctcctgggccgaaaagagagtaagggatggtttccgctctttaaagacacctatgtttgctccggttcgtcatattgatacgatgaaaaaggtagagacctatgttgagaaatttgcagcgattcgaagtaaggtggggatggatatagatattgccatagattttcatggcaggatatcacctgccatggcacccttgctttgcagagaactggaaccattttttccaatgtttattgaggaaccggttcttcctgagaatgtagatgccatggttaaggtagctgaatccacagccataccgattgccaccggcgagcgattgtttactacatggggatttagagaagtaattgaaaagcaggcagcccaggtgcttcagccggatttaagtcactgtggaggcatactgcaggcatttaaaatcgctgcgatgggcgccaattactattgctctgtggcaccccataatccactgggacccatagcactggcgtcctgccttcagattgatacatgcattcctaactttaccgcgcaggaacatcccaccatgccggatggccatgatcttggcaaggagctgtttgttgaggaatttgttataaaggatgggtatattgatataccgaaaaagcccggacttggctttgaaatagatgaaaatgcagtgaaagaatactcttatgacggtcattacgcatgtcctgtagaatttgatccggatgaccattcattaggtgactggtaaggaggaaagagatgaagattacaaaattagaaacatttcatataagacccaggtggttgtttctgaaaattactacagatgaggggatgtgcggatggggggaaccggttattgagggaaggagccgcattgttgaagaggcggttcatgttttaggagagcagattattggacaagacccattccagatagaacatctgtggcagttaatgtaccgaggttctttttatcggggaggtgccatcctctgcagtgccataagcggcattgaacaggctctttgggatattaaaggaaaagctttgggagtaccggtatggcagcttctgggtggaaagtgcagggacaggatacgcatgtacgcacatatcactccaattgaaaacccatcgccagctattatctgtcaggcggcaaaggaaaaggtagctcagggctatgatgcgctgaaaacacctatgcgagtacccgtaagacacattgataccatgaaaactgtgatagagtatgtggataagtttgccgctctgagggatgctgtgggaacggatgttgatgttgccattgatttccacggaagagtatcgccagccatggctcctatattctgccgggagctggaaaaatactatccgatgtttgtggaggagccagttcttcctgaaaatgtggattctatggtgcgggttgccagatcaacaacaattccgattgccacaggagagcgtctgtttacaccgtgggcatttagggaggtacttgaaaagcaggcagcccaggtactccagcctgatttgagtcactgcggaggcattctttctacttataaaattgcatccatggcagcaaattattatgcctctatagccccacataatccgttgggtcccatagcactggcttcatgtctgcagattgatacctgtatacctaattttaccgcacaggaaaatatacggctggaagatggttcggatttgggagctgggttatttaaggagccgtttgagattgtgaaaggctatattcaggtatcagaaaagcctggcttaggatttgaggtggacgaagataccatgaaggaatttatctatgatggtaaattcacatgtccggttgtctattatgaggatgataactcattggctgactggtaaaggaggaagacgtggagagacattttcgacaggactcaatatcaatgaaaagactcatgccatatttctttataggaccagccctgttagcgttggtcgctctggtggtgtaccctcttttatacggcgtttatatcagcttttttaaaacaaacctggcaaacaaatgggattttgtagggctcaaaaattatataagtgttttttcagacggtgtctttgtaaaacagctgggagttacattgaagtttactgcaattgtcgtactggcccattttattataggtatatttctggcaatgttgttaaaccagagcagacctggaatcacattttttcgtacaattctggttctgccatggcttatgccagaagtagtcatcgccttgatttttaaatggattatgaatccgttgtatggtctgttaaactacgggatgcagcttctgggattatcagagggaggagtatcctggttgggagataccaaatatgcgtttataagtgtggtattggtatgcatatggaaggggtatcctctggtgatggtaaatgcgctggcagcattacagagtgtttccaccgatatatatgaagctgcaaaggtagacggagcaaacaaaatacagacattttttagaattattcttccgtctattaagccggttctggccacaacgctgattttggatacggtatggtggtttaaacattataccattgtttatctgatgacaaaggggggaccgggaagcgatacatcaattgtaagtattgagatatataaacaggcgtttgattattttaattttggcaaggctgcctcaatgtctgtggtcgtattttttgtctgcctgattatcagcaaactttacaggaggtttttggataatgaagactaaaacagcccataggggaatgaggcgttcgaaattgttaagtggaaccgccacgtatctgatactgggattctgcgtggtcattgtgctgatacctatcctgtggatggtgtcaacttccattaaaattgaatcagagacaattacaataccgccaagatggattcccgaacatccaacagcgatgtcgtatatgagactttggaaggagtatccgtttcttacttattttaaaaacagtatcatcatatctgtaggagcggtagtggtttctgtcatgttctcatgtctggcaggatatggggtcaccagattccgttttaagggaaaggagagctttttgggatttattctcatgacgcagatgtttccctctatcatgctcctgattccatattataaggtattggatatgtatgggctgaaggacagtctggtaggtatgatgtgtgtgtacatctcatttacaattccattctgttcctggatgatggttggtttcttcaggacaattccgctggaattggatgaagcggctattattgatggatgttcccgatggaaagctttttataaaatcacgctacctatgacattgcccggaatatcatcctctgcaatttatgcattcatcacggcatggaatgagtatatgtttgcccaggttctgattatctcacctgagttaaagacgctgccccttggtattgcagagctaaatggtttctataagattttgtggaatgatttaatggcagcatctgtgattgcgagcctgccattgataattctgttcatatttttacaaaaatattttatcagcggtttaacagcaggagctgtaaaacaatagaaggaggacgtttcatatgaggaaaagatttatgagtatcattttgtgtgcagctatgtcggtgaccatactgtcaggctgttcaggcggcagtaaggaggcatcggaggcaaaggactcgggtgcggcacagtcgcaggtggatgaaagtacagaggccggctcgccggaagagacaattacgctgcgtattttatcaacattggccacggagacagaagctccgctggaacaggctatggcggatgcatacatgaaggaacatccaaatgtaaagattgaactgattggacagccggtgaatgatatggcgaaaaaaatcatagcactaaataccagcggtgatctgccggatgcgttttttatgcccacagagttcatgtctcaggcatacgatatgggaatcattgtggatcatgaagcccttctgggagaggattttatgtccgccctaaatgagaaagtagtggaatatggtaagataaataaccagcttatgatggttccctggcatgtaataccagttgcgctgatttacagggcagattggctggcagaagcagggattgataaaattgagacagtagatgactttagaaatactgctaagacatttaccaaagatgggcattggggatttagtatggtaggtacccaaaatggttcaggggaggcccggttctgccaatatgtcaggacctttggtgtaaatgaagtctatcaggatgagagcggaaaatgggtgtctgatttaacttcagacaattataaaaaggcattgcagtcctttgttgacctggcgcttgtggatggtgtggtgcctccgggacctactgaaaccggatatccggaagcagcggcatactttgcagaacaaaagacaggtcttatgatttccggttctaatgcaatcggtgcaatcatcagtgcaaaccctgaattagacggaaaactggccagcgtaccgttgccggcagcagagagacatgcgaccaatcttcagacatccggttatgccataacgactgcatgtgaacatcccgacgtaatggcagattatctcaaattcatgacctcgaaagatctggcagttgattttggcatcaagacaggacgccttccggtgaccaaagaggctgccgaagatccggctttccagactgatacgtttaaaggatttattgactgtatggaatatgcacttccacagccagcatttcctgcttacacggaaatcctggatgtcatgggagaatcctataatactatgatgggcaataatgtttccattgacgatgcaatggctcaggttgccaacagagtggaagggattctgtctgagaatcaataacgtgaatatctgggccgggggtttgctccggccccttttcatagggggaatgtcatgtatactctttcagcagactttggtacctcatctgtcaaaactgcggtgatagatgaacacagaactatattaaaggccagcagacgcagctatcagtatcgtattttagaagaaaatcaggttgaactcagtatggaaaccgtggaggctgccttctatgagacggtcagggaactgaaagaattccttccatatgtaagtttaattagttttgataccttcgccccatctctggtgatgatggagaaagacgggaaaccgttgtatccaattgtaactcatctggacagaagaagcagggagtatacaaagaagattatagatatctttggaaaagacaaatataggaatattaccgggactttgccttacgcagggggagtgaccttgacctctcttttatggttctttcattatcgcccggaactgacaaaaaagatttataaaataggtcatttgtcaacctatctgtttaaaagactgacaggacaatgggccatggacgaagtaaatgcatctattaccggtatgtatgacacagtacataattccggctggtctcaggaaatttgtgagaaatcaggagtgcctatgagtatactgccgccggttaaggaggcaggaaacaccttcgaacttgttttgccggaaatggcagagaagctgggggttggcaggaataccatggtgaatctggggacacaggatgtagccagcgccttagccggagccggagccgataaaaaagggcaaatattatgtatatcaggcagcagtgagatgattgctatactgactgataagccggtaacaaatgataaatattatctgagaaattcaggtataaagggattgtggcaggtgttttccattaccacaggcggatttgccatagactggtttcgggaacagttttatacggacatgtctaaggaagaattctacagcagttttttgccggatttgctggagaaacggtttgacgctggaggcgtgacgtttcatccataccttacaggcgacagacagagcctgaaacggaaacgaggaagctttgggggattatctttggatacaaaacgggatcatatgctctgtgccctggtggtgggaatacaatcccaggccatgcagactcttaggctctgcggggacataattcccaacaaacaaaagatgacggcgacaggaaatctggcagaaaatgaggcgtatataaatattaagtccagactgtttggcggggcggctattgaggtaattgataactgtccgctgataggaaatgtcagaaggatgctttagggagaaaatggaatggtaaagagagtagacggaatttttgtaccggtggtaactccctttgatagtgagaaccaatcagtcggtacggaaatgcttgagtataatattgaacgtttgaatcatacagacataagcggatacatgcctttgggaagtaatggagaatctttcatgatgacggacgacgaatgctgccgggtcatagctgctgtaaaaaaggtggcagcaaaagaaaaacttatatttgcagggactggaagagagtcggaatattatacaattgaattcactaaaaggattgcccagtatggagttgatgctgtatttgtgctgacacctcattattttcctaaacagatgggtcaggactgtctgagaagttattatgaacaagtggcagatcgctctcctgtaccgattctgctgtatcaggcaccggcatatgcggcaggcgtttctttggaaacagctactgtggcacagcttgcaaagcatccgaatatcattggtatgaagggaacggcatcaaataccgcaggctgctatatggaggccatggacaatgaaacctctttttctattttagccggaacatttggagcattctgcgaaaatgtcagagacggcgcggctgggggcgtattgtcctgcgcaaactatattccccatagagcatgtgaattgtataatttggtaaaggcagagaactgtcaggcggatatattatatcagaaaataaccggcctgattaaccagacaaccggaccgctcggtgtaggaggcgtcaaaatggctatgaatattttaggatatcagggcggagttaccagacgtcccttgccatatccgaaagagagccaggtaagggatgccagatcaatatttatgagaggagatttagaatgcagataaaagaaatgcttataaacgcaggaaagaatggtgcggcagccggggcttttaatattcttaattataccacagccagagcagtaatcgaggcggccgattcgtgcgggtgccctgtgattttgcagacttctgtatctacggtaaaaagccttggattagaagcgctgggtggtatgcttaatcagcttaagggattatcggcgcagccagtggttgtgcacctggaccattgcagggatcaggaactggccagaagatgtctggacggattctgggattctgtaatgattgacggctcccatctcccgatggaggagaatattgaatttaccaaagagatcgctgactatgcccataaactgggaaaagaagtagagggggagcttggagttattgccggagttgaagatgatatacataatgagaaggggacaggggttgcggttaaagattgccttttctatatagagcagacaggcattgatatatttgctcctgccattggaaccgcgcatggcatttaccacggagcaccagtaatacggtatgatcttgtggaacaattgcgcggtgctacagatgttcccattgtagttcatggtgggagcggactttctgaggaggtttttagaaaacttattgagtgcggggctagcaaaatcaatatatcaactgctgtgaaacagagttatcttaaagggatgagggaattctgcgggattaataatcctttggaggttgatacggctataaagcaggaagtaaaacaggcagtgcaggagcacatcaatatattttcaatggggaggtgagtgtaaatggcatataagagggcagcatattcctgtgatttgcacacgcataccaatcattctgatggtcgaaagacgcctaaagaggtaatagatgaggcagcagaagtgggacttaaggtattggctattacggaccacgacgtgataccgccagagtttatagacacagaagacggaccggtgtctgtgacggaatacgccaggaaaaaggggataatctgtattccgggaattgaaatttcctgtgatacagaaaatgaggatgtacatttggtatgtttgggatgtgactggaagcatccatttttcaggcagatggaaaaagaaattcagggcagcaaactggaatcctatcgtactatgttggaaaattttaaaagagcaggttatcatgcagagtggaacgacatgctttgccagactggaaacataaggcatccggaacgtatacagaaaaagcagatttttcaataccttgccgattcaggcgctgcatccgaatggagccaagttaaaaaaatggttcagacgaattctgaattgtcggtaaagagaagaaagccagatactgtggatatcattaaaaaaattcatgaaacaggaggcgttgtgatactggcccatccatatctgattgccgaaccagttaattggcagggaaagcccataacaaggaaggcttatattgatgagttaatagatgccggactggatggaattgaggttcgttatacatacgataaaacaagttataggggatgccagtctaaggatgagattgctgaggaggtgagactcctttatggagaccgtgttgcaattttgtcaggcggttcagactgccatggagagacaaaagagcaggtggctaatccacggtcactgggggaagaggggattacattttcctatatgcagtccaaccaattgctgagaaatttcttataaagtacagaaaaaccggagctgtttttatatcctaaggcttctccgacaacaaccgtatggaggtggcatactcagacggagtcatagtggtaatctgcttgaactgccgtgaaaaatagtggatggagttgtatcccaagcggtctgcaatctgggtgaaatttagctggttgtcacgtatcatttgtttggcagtgtcaattttcatcatggaaaagaattctatgaccccgcagccttttgtgtcccggaacagcttttgcagctgggagcgccccaccaggttgtcccggcagattctgtctatggtcatgcgttcgcccagatgctcctccatgtagcggacgattcggttgtaggtatcattcccgctgctggcctcggccaggaagcgggaagaacgtactggcagggagtaggaaaaatatcttctgtatagatgaatcatcagctgttccaggtaatggctgatgagctgggccgaaccaaaggtcaggggttcgctgttaaagataagctcctcctggtaagggtcatccagtcttccgctgaatgtgtttctggcttccacgatgatttgggccatgagttctttttccgtatcctggaccgacatgagctgatcctcaaatgactttatggcaggggaatggcactcgaacccaatgaccaccaggcttggagagacttttccgttggtcagtacgttgtggaactcattgggcttgtgaaacagaatattccctttcttcagggtcagacgccggtctcctgccaacgcatcaatttcgcctcggtccacgcataccagttcccagaagtcatggctttccccgggaaaggagaagtcgctcatatactggaaatagtggacggagataatccggttgatggtaacgctgtcctccagaactacacttttataggccatgtaatctttcctcccgcactgtctttttctgaaactgtcttatcttcttgaattatatcacaggaattaattctgcagaatacaatcatgcaaataaaatgatagaatgtgcaaataaaatcccctcagctgtcttgttacaaaaaaagcgatccgctatactttatttaaacgaaatcaagagttataggctcatggaatagagccaatatgaagattagagggaggatacagacatgtctaagacgaaaggaagggttacacttcccagtgaatccggttttttgaaggagacaaaggagttaatggagcgctggggcgctgatgccatccgcgacagtgacgggacaaagctggataaggatgtcaagtctctgggtgcggaaatttataccacctattttgtggcaagaggacacaatgaatttgcagctaagcatatggaggaatgccagcagctctaccttatgtcccggcgttttacagcagtgggaaaccatctggagatggactttatggaaggatattttgaccagcaggtggtaccggactgttaccatgaccctaagaaatggtgggaggtcatggaccgcaccacaggccaggcagtccccgtctcccagtgggagctggcaggggcgtccatgccggaaggtttttgcagcggcagtgagtttaagggtgtgtttaaaggcgccggagataccgcagacgccgggaataccgcagaaaccaaaaaagcagaagctgtttccgcccccatgcgcgtggtgctggagcacgcgtcgccttttcacgaatacacggtatccttcctggcatacgcggtgtgggaccctacccagatgtacaatcacataacgaataactggggggacaaaccccatgaaattccctttgatgtgcgccaggaggcttcaggactgtttgcaagggagtacctggtacagtggttaaaggataacccggatacggatgttgtgcgtttcaccacatttttttaccatttcacgctggtgttcggaagtgacgcaaaggaaaaattcgtggactggttcggatacggagcaaccgtcagtgtgaaggcgctggaggaattccaggccgaatacggctacgccctcagacctgaggacattgtggacaatgggtactataattcttccttccgggttccgaccagacagtacagggattatatggattttatccagcgctttgtggcggaaaaagccagggagctggtggagctggtccatcaggcagggcgtaaggccatgatgtttttaggcgacaactggattggtaccgagccttacggcgcttatttcccggaaatcggcctggacgccgtggtgggaagcgtgggaggcggggcaacgctgcgccttatctccgatattccgggggtgagctatacagagggccgtttccttccctattttttccctgacacattttatgagggaaatgatcctgttcctgaggcggtggaaaactggatttgcgcccgaagagctctgatgcgcaaaccggttgatcgtatcgggtatggcggatatctgagcctggcctataaatttccgggctttgtggattacattgagaaggttgcggaagaattcagggaaatttatggaaatatcggaggaagcaggcctttttgcgggctgaaggcagctgtgttgaactgttggggaaagctgcgctcctggcagccctacatggtggcccatgccctgtggtataagcagacctacacctatttcggcattctggaggcactgagcggggcaggtgtggatgtggtatttatgagctttgacgatatacgcagttcaggtatacctgaggatgtggatgtgatcatcaatgcaggggatgcgggcacggcctggtctggcggggatgagtggctggatgagcagattgtcacggcagtgaggcggtttgtctgggaaggcggcggctttgtgggagtgggcgagcccagcgccgtgcagcggggcggacggtatttccagctggcagatgtgctgggggtggataaagagcagggcttcaccctgtcaacggacaagtatcatgtaacacaggcagacagccactttatcacacaggacgttccaagggatgaatcaggaaggctggttctggattttggcgaagggatgaaaaatgtgtatgccttgggaacggatacagagattggggaatattcagaccatgaagtccacctcagcgcccatccatatggaaggggacggggcgtgtaccttgcgggtcttccttacagccatgagaataccaggcttcttataagaagtatgtattatgcggcctgcaaagagggggaaatgaagaagtggttctcggataatctgttctgcgaggtacacggatatccggaggcggggaaatatgcggtggtcaacaacaccagccgcgggcagtccacggtggtttatgacggggatggacatgggacatccatggagctgctgccctgtgaaataaaatggtttgacttataagccggccaacctggaatgaactaaatatggcagtctttaacaagtatacaaaatgacttacaagcgttcggagacagaatcatatttgtgtattatacatagaaaaagtctttttgtacaaataaataaatttatagtgcaaagaactttatgtgcatatttactataattggattatcggtagtgaatgtgaatcggcaaaaacacaataagattcaaggaggacgtattttatgaaaaacagaaaatggatggcattggcattggcggcagccatggttggctccctgacagcatgcggcggcgggtccggcaccgcggataccacggcagcggcagcggcggctgacaccacagcggctccggcagcagacaccacggcggcagcggacgcccaggccccggccggagacggcacaggtctggtatactggtccatgtgggagtccacagagcctcagggccaggtaatcaaggaagcagttgacaagttttccgcagacacaggagtggctgtagatgtacagtttaagggacgtaccggtatccgcgagggattacagccagccctggacgcaggaaccaacattgacctgttcgacgaggatattgaccgtgtaaatactacatggggcgcttatctgatggatctggaggaactggctaaggcatctgattatgacgccactgccaatgcaagcctgatggaggcctgccgcgaggtgggagggggaacccttaagtccattccttatcagcctaatgtatttgcgtttttctacaacaaggcaatctttgaggaagccggcgtggccgctgttcccaccacctgggcggaattggacgcagcatgccagaagatcaaggacgcaggctacacgcctattacatgtgacgacgcatacatactttgtctcttcggataccatatgtccagactcaacggctacgacaagacatcggatattgtaaagaacaataagtgggatgacccgtctgtgatggagacagccaaggcttacgcagattttgcgcagaagggatatttctcagaaaacatagcatccaacgtattcccggccggacagaaccaggagctggcactgggaacagcagccatgtacctcaatggttcctggcttccaaacgaagtaaagaacatggcaggcgatgacttccagtggggatgcttcagctacccggcagtggaaggcggtacagacggtacggaagcagcaaactacggcggccaggttctggctatcaacaagaactcacagcacgcagaggatgcatttaagctgattacctatattaccaagggtgagtttgacaagaagctctctgaggaatccctgggaatcccgtccgataccaccaattcagagtggcctgtacagcttacagacgtgaagcctgtaatggagagcttaaagacacgttatccatgggctgccggcgcagaggacaatgtggatatgacgccaatcatcaaagagaacatgaccaagctttgcagcggagccattacagcggatgaatttgtatccaatctccaggcggcaggaaagtaatcatataaacacattcaaaacattttccacggaatatgcaacaatgaggtggcatcgtataacgctgccgcctctttttgggctccggagcgtatccggaccaggtttatgttaggaggaaccggcgtgaaaaaaaataagggaatgttaattgtgttcatgacaccggcggtggtgatgttcgtcctggtattcctttatcccattatcaggactatccttatgagctttttcaagattgagggaatcacggaccccatgtcaaaatggaccttcagcggtattgataactatgtgaagctggcaaataccaccttgttccgcatctccatgtggaacctggcccggatatggtttatcggcggtatcatcgtcatgtccctggcgctgctgtttgccgttatcattaccagcggcatccgcttcaagagctttttcagggcaatgatttatctgccgaatattgtcagcgcagtggccctggcgaccatgtggctacagtatgtctacagccccaagtacggactgattaaaaatttcttccaggctttgggcctggattccctggcaaagatacagtggctggataatgaccacaagttcatggctctgctcctggcctactgtttcggcatggtgggttatcacatgctgatatttgccagcggcattgagcgcatcagcgacgattattttgaggcggccactctggacggggccaataagttcaaccagttccgctatattacattaccactgctaaagggagtgttcagaaccaatgtcaccatgtggagcgttaccagtgtgggatttttcgtatggtcccagctgttctccacggtaacggctgatacccagaccattacccccatggtttatctgtacatgcagatatttggggcaggcaacagcgtcacggagcgcaattccggggttggagcagctgtcggcgtgatgctgagcgtatgtgtggttattgtgttctggctctgcaaccatctgcttcaggataaagacctggaattctaggaaagggggaaaacatatgtcgggattatttcagaaaaaagagaaactgcacagggaaccggtgcgctggaagaaggaactaaagcttgcccccggatacctgattcttaccctgtggattctgtttaccctggccctgctgggctgggtcctgctggccagcttttccaccaccaaggagatattcagcaataagctgctggatagcggattccatatagaaaattatgtgaaggcatgggtcaattccaatgtctccaccattttcttcaattccttattttacgcggcggtatcctgtaccctgctgatactgatttgcgcgcctgccgcctatgcgctgtcacgttttgactttgtgtgcaataaactaatacagtcatctcttgtggcgtccatgggtgttccggtagtcatgattgtgcttccgctgtttgccgtggtggcaggtctcaatatccttaataatgtttcggccaaccgggccactctgatattcctgtatatcggaatcaatgtgccctacaccaccattttcctgaccaccttttttgccaatctgtccagggcgtttgaggaagcagctgccattgacggttgcccccctgttaagaccttctggctgattatgcttcccatggcccagccgggaatcgtgaccgtaaccatattcaacttcatcaatatatggaacgagtatttcatctccctgatattcggaaattccgacaaggtacgtccggtggcagtggggctgtattccatgataaactccatgaaatatacaggtgactgggccggtatgttctctgctgttgtcattgtattcctgcccacctttatcctgtatatcttcctgtcagagaagattatagcaggcgtaaccggaggcggcgtgaagggataggatagaacaggaaacgtgaaggaataaggatatatcttgtgaggaggaaggacagcatgtctcagaaaccagtattagtaatcatggcggcaggtatgggaagccgttacggcggattaaagcagattgaccctgtggacccttatgggaatatcatcattgatttttccatatttgatgccagggaagcgggatttgaaaaggtcatattcattatcaagaaggccattgaggaagattttaagattcacattggaaaccgaatcagtaaatatatggatgtggcctatgtttaccaggaactggataagattccggatggataccaggtgcctgagggccgggtaaagccgtggggcacaggccatgcagtgctttgctgcagtgccttgattgacgggccttttgcggtaatcaatgcggatgattattatggaaaagaagcctttcacatgatatatgaccagctgtcctctgtggaggacacggaccgataccagtataccatggtgggctacaggctgtacaataccctgacagagaatgggtatgtggcaaggggcgtatgccggacagatgcaaaaagccgactggtggatatacatgagcggaccaggattgaaaagcatgggagccaggcggaatatacagaggatgacggagctacctggacagaacttccggagtccaccattgtttccatgaacatgtggggatttacaaagagtattctgggcgagctggagaaccggttcggggctttcctggataaaaaccttcctgtaaatcctatgaagtgcgaatatttcctgccctttgtggtggatgaacttctgaaggcagatctggcccaggtgactgtgctaaagagcgtggaccgctggtatggagttacctataaggaagataaggagacagtggtaaaggccattaaggaccttaaggataagggcctgtacccggagaaactttgggaggaactggtaaaatgagcggagaaatggataaacatatactaaaggaggcggctgcagcgtttgccacggatggggaagcagtcagctgccagcgctacggcagcggccacatcaatgataccttccgtctcatatgtgagaaacatccttatattcttcagaggatgaatacggatatctttcaggatccggtatctcttatgcggaatattgagggggtcaccaccttcctgaggcaggaggtcattaaaaataacggagacccggaccgggagaccctgaatcttatcaggaccagggagggagccccttactatgtggacagccggggaaattactggaggatgtacctgttcattgagggagccacctgctataacctggtggagaagccggaggacttttaccagagcgggaaggccttcgggcatttccagcggctgttagcccactatccggccagagagctggcagagaccatcccgggttttcatgacactccgggacgcttccgggctttcaggaaggcagtggaggaggatatctgcggccgggcgtcagaggttcacaacgagattcagtttgtcatggacagggagcaggatatgggcctggccatggatatgctggccaagggggagcttcccctgagagtgacacataatgataccaaattaaacaacattatgattgatgacaagaccggccaggccatctgcatcattgacctggatacggtaatgccgggactttccatctttgattttggagattccatccgctttggcgccaataccgcagaggaggatgaaacggatttaaccaaagtatccctgtccgttcctctctttgaaatctataccagaggatttctggagggatgcgcgggaagccttaccgaagcagaggttaagatgcttcctcagggagccaggctcatgaccctggaatgcggaatccggttcctaacggactatctgtccggcgacacttattttaagattgccagggagaagcataatctggatcgctgccgtacccagttcgggctggtggaagatatggaaaagaaatggggagagatggaacgtatagtggaggctgtctgtaagggctgaaacaggaataaaacagagacaaaaaaggtgtctgccatgggggggacacctttttcatatgttctggcggctctgggggcgccgggcatgggctgcggttttacacacattttacataaactataccatattatgatttctccggatgtaaattttatgtatactccaaactgtagaaaagataacaaaaaacatgataataaacgatatgattcaggaggaaacgtattatgagaatgaatggaaagaaattaacggtactgttaggcacagcggttctggccatgggtatcctggcgggctgcggcagcagcgccccggagacaaccgcagcagggacagccgccccggcgaccgaggcagggacagatgcagggtcttctgctgcgtcaggagacacaaaagacacagaagcagcaaaggcagagaatgccccgtccgctgatttgagcggcaccatcagtatggtgggatccacttccatggagaagtttgccaatgcgctcagcgagtcctttatggagaagcacccaggtgtgacggtgaccgctgaattcgttggatccggcgcaggagtggaggctgtcagcaacgggacagctgatatcggcaattcttccaggaatttaaaggatgaggagaaggctgacggcgtggcggaaaacattgttgccattgacggaatcgcagtggtggttgatgccgccaatacggtggaggacctgaccaaacagcagctgtccgatatctatgaaggaaaaattaccaactggaaggatgcaggcggaaatgacgctcccattgtagtggttggacgtgaatccggttccggtaccagaagcgccttcgaggagctgttagagctggaggacgtgtgcaaatacagcaatgagctggacagcaccggcgcagtgatggcaaaggtggcctctacaccaggcgccattggctatgtttccctggatgtactggacgacacagtaaaggctgtgaagctggaaggcgctgagcctacagaggaaaacatcaaggcaggctcctacttcttaagccgtccgtttgtaatggctaccaagggagaaataagcgagcagaatgaccttgtaaaagccctcttcgattatatctactcagaagaaggcgcagagatagtgaagtccgtgggactgattgcagttgacaaataatcggaatagagaaaggagacttcctgcatgagagcggagacattttccatacgatcctgtcatggcagcaagtccaccgtcgaaaaagctgcacagggcatctttactgcctgcggctttttcgccgtattggctgttgcctccatcacactgtatatgcttatcagcggtacgcctgcgctgtttaaagtggggctgctggaaattttgtttgggaccgtgtggcagcccgcagccgcatcccccagcttcggtatactgtttgtcatactgacctccatcgtgggaacctttctggcaattctgattggagttcctatcggcgtcatgacagccatattcctggcggaggtagcccccaaacggctgagcgacatggtccgtccggcggtagagcttctggccggaatcccctctgtcatatacggcctgctgggaatcctgattcttaaccccctgatgtacaaaatggaactgatactgtttaaagggtctgaaacacatcagtttaccggcggagccaatctgatatcagctgtgctggtattggccctgatgattctccccacggtcataaacatcagcgaatctgccctcaggtctgtgccggcccatctaaagagcgcgtccctggctctgggcgccacaaagatacagaccatattccaggtaattgtgcctgcggccaaatctggtatcataacagccgttgtgctgggtacaggcagggcaatcggtgaagccatggccatcagccttgtgtcgggaagctccgtaaacctgccccttccctttagctctgtacgtttcctcactacagccattgtatcggagatggggtatgcctcgggacttcacagacaggtgcttttcaccatcggcctggtactgtttgcattcattatgattatcaacataagcctgaccaggattttaaagagagggggaaacaggaatgacaaatgatattgcagtccgggttcataaggactctgttgtgcaggacagtatatacggcaggcgcgtgcgcggcctggatgtgtttcttacggtcatcatatatacctgcgcgggtttctccatccttcttctggcaggcatcatggggtatgtgttcgtgcgtggaatcccgcatgtgacgtgggcatttttgagtactgcctccagcgccacaaagggaacctttggaatcctgggaaatattataaacacactgtacattgtaatcattaccctgctcatcgccacgcccctgggcattggatccgccgtatacctgaacgaatacgcaaagccgggaaaagtggtgcggctgattgagtttaccacagaaaccctgtccggtattccgtccattatattcggcttgtttggaatggtgttttttggaaatgctttgggactgggatattctatccttacaggagccctgaccctgaccattatgattctgccccttataaccaggaccacccaggaggcgcttaagactgtgccggacagctaccgccatggagcccttggaatcggagctacaaagtggtacatgatacggactatcctgcttccaagcgccatgccgggaattctcacaggcataatcctggctatcggaagaattgtgggagagtcggcagctctgctgtttacggcgggaagcggttattacctcccaaagaatctgttttccaaaatatttgaatcaggaggaaccctcaccatacagctctatctgtttatgcagaaagcaaaatataatgaggcctttggtgtggccgtggtccttctggtgattgttctgggaatcaacggtctggcaaaatacatgtcccaccggttcaatgtggaagccggggcatagggatggggcggaccatttcaattagcaaaggagagaaagcgtggaaagcaaaacaaagatttcaacccggaacctgaacctgtactacggggagaatcatgcccttaaaaatataaaccttgatttgtatgaacataagattactgccttcatagggccgtcaggctgcggcaagtccacttacctaaagacactgaaccgcatgaatgacctggtgccgggcgttaagatagatgggactgttctcctggatgatgaggatatttatgattcccaggtggataccaccctgctgagaaagaaaataggcatggtattccagcagcccaacccctttcccatgagtatctatgacaacattgcctatgggccgagaatccatggcattaagaataaggcccagctggatgagattgtggagaacagccttaagggagcggctctgtgggatgaggtctctgaccggctgaagaaatcagccctgggactgtctggcggacagcagcagcgcctttgtatcgccagggccctggccgtggagccggaagtccttctcatggatgaacccacgtctgccctggaccccatatccactctgaagattgaggatctgatggatgatctaaagagtaaatatacagtggccattgtgactcataacatgcagcaggccacgcgtatagcggaccacactgcatttttcctggtgggagaggtagtggagtatgcgactacggacgaacttttcaccatgccgaaggataagaggacagaagactatataacaggccgtttcggatgatggcagaaggaaggtatcagattgagcgttagggttacgtacgaacatgaattagaagtattaaaacaggatttaaaagaaatggcccatatggtggagagcgctattgagcagaccttcatggcatttgaggaccaggattatacgatggctgaggatgtgattaagggcgacaggaccgtcaatgatatggagcgggccatcgagtccagatgcctgtccctgatactgcgccagcagccggttgccagcgacctgcgccaggtatccactgccctcaaggtggtgactgacctggagcgcataggggaccatgcctcggatatcgctgagctgattctgaggataaaaagcgagcacgcataccacattgttaagcatcttccggttatggcggcttccgccaacgcaatggtccatgacgccatagaagcattcatcaaccaggatttagattctgccatggaaatcattgaacgggatgatgaggtggatacactgttcaatcaggtgaaggacgacgtgattcatctgcttaaatcctccccggaccaggcggaccagggaattgacctgctgatggtggccaagtatttggaacggataggagaccatgcggtaaacgtgtgtgagtggacccagttttccaagaccggggcgcttaagaatgtgagaattatgtagataaaccaaaatggttttattggggataaatggaacggtgcctgttatgaggatatcaggcttattaacaatgaaggacattttcaaactaagttaaaaacttaaaataggataaatgccgcagagcaatgctgtaagtccagcattgctctgcggcatttgtattattatcagagaaaacccccttaaatagtcagctgctcaattgctcaatgcctcgaaatgaaaacatatgaaaaaaagtgaaataacaaaaaagcagagttacattggttttcgtgtttcagtcattgaattagttaaaacctccttgaatgatgtataaatctatgtatcaaactaaaaaatgtagaatacggctgaatataaatgaaaaaatatagaaacttatgccaaaaaataaaataaaatattttgaaaagtattgacataatttgaaacaaatgctattatgatgctacaaggaggtagcaatcatatgaagtatgccacacggattaactcgtttttgagatttgacagcaacctgctgaatgcattccgttccataggctccattgaaggagtggattatgtggatttgaattatccggaacattttgctgattatgatatagaggtgataaaggcaaagatggaggaatgcggactgagatgtaatgccattaatctcaggttcagggacaagtacataggaggagagttcggaaaccatgagccggccatatcgcaggacgccataaatttatgcagggaggcggcagatgcgtgcagaaagctgggaggaaaccagatgattatatggctgggatttgacggttttgattattccttccagattgattatgtaagctactggaaccggattgtgaaggcgttccgggatgtgtgcgactattccaaggtgcctgtgagcattgagtacaagccctatgaggagagggtccacgcttttattgacagctttggaactgcggtttccattctccacgatgtggacagggaaaacctgggggtgaccctggacttctgccacatgctgatgaagaaggagaatcccgcgtttgcagcggcctggctgctggagcgggggaaactctacaatatacatctcaatgacggagagggttccacggatgacggcctgatggtgggaaccgtgaatttctggaagacagtggaggtcatgtactaccttaaaaaatatgacttccagggtgtgatatattttgacacatttccaaagcgggagaaggcggtggaagaatgtgaggcaaatataaagatgtgccggcggattgaacagcttattgacgcctatggactctgccggatggagaaggtggtggaacagaacgatgcggtagctgtaagcagcatgatggttgctttattataaacaaaaactattttaatgtaaaaggagaagagaagatgaaaaagagaggtttggttttatctgtgacagcaattgccatggcagcgggactcatggcaggatgtactaataagcaggcggccgccacggcgcagacagaggctgctgccgatacctttaatccggataaggaggcaggggtcagcattgaagaattgagagagaagctgggggatgttccgaagcaggacggtgaggttaaattgggagcagtggcaaaatcctttgataatgagtactggagaaccctgagagaggggtacggcgagtatcagacaaaggcagccgccgccggctgcaatatcaccatagacgtgacctcggcccagggtgaaaacgacgaacagggacagctttctattgtaaaggatatgattaataagaagtatacaggacttctcctttcgcctatttccgacggaaacctgacacccggtgtggaggatgccaagaaggcgggaataccggtcatcaatgtgaatgacggcctgattgccaatgcggattccttcgtaggtcctaaggcggaccagaacggagagctggcagcggagtggattgctgataagctgggaggtaagggcaaggtggcaatcgtcatcggtatgcctaaggcgtttgcggccaggcagaggacggaaggctttgaaaactggatggcggccaacgcaaaggacattgagattgtggcaaagcagaatgctgactgggaccgtcagaaatccaaagatttggctgacacatggattaaacagtatccggacctgaatgccattttctgcaacaatgataccatggccctgggcgtggtggaggctgttaagtcatccggcaaggatatattggtggttggcgttgacggtataggagaggcgtatgattccatccgcaggggcgagctggatgccactattgattcattcccgttctataaagctcagattgcaggtgaagtaatgctcagaagactgggcggacaggagattcccagggtgctgtggacgcctcaggctctcattgattccgagaacgtagataagccggcagaggaaatcatcggctggacagatcctgtatatgcaaaatagacaaaaggcagcaaggaaactatcatcagccagagggtcagacccctggctgatatttcaaagaggggatagaatatggcgacaatgatacatttttctaatataacaaagcagttccccggcaacaaggcgctggacagtgtggattttacggtggataaaggggagatacacgccctccttggggaaaacggcgcgggtaaatctacccttctcaatatccttcacggcatctatcctgattacgatggaaatgtggagattgacgggagaaaagtgggctttaaaaatgccaatgatgccatcgaattcggcattgccaaggtgcatcaggaagtaaaccttgtgactgagctgacggtagggcagaatatagcccttggctacgaggtgaccaggggattttttgtggactacgatgccatgtacaaaaagacggatgttatcctggaaaggctgggctgcaaattcagaagcagggaccgtgtgacctctctcagcactggcgagatgcagatgattctgattgccaaggcattgtttcacaatgcaaaaatcatttcctttgacgaacccacgtcagccctgacagaccgcgaggtagaccgtttgcttaagatgattatggaactcaaggaccagggaattacgatactgtatatcacacaccgtttggacgaggtatttgccatagcggacagggccagtattctgcgcgacggaacgtatatcactaccctgaacatgaaggagacatccaaggaagagctgatacgccacatggtaggccgggatgtgtccgcttatgcagttagaaataatcccctgtgcgccgccggtgaggtggtgctggaagccagggacctgtgcaagaacggggtatttgaacacataagctttgagctccacagaggcgagattttgtcctttgccggactggtgggatccaagagaacggatgtgatgcgggctatattcggggcagacccctataccagcggggaggtttacataaaagggaaaagggcggaaattaagagtcctaaggatgccctgcaatacagtctggggctgatacctgagaatagaaaaacgcaggggtttgttaagaactttacgaatgccagcaacatggccctggcctccatgaaccggttttgcagcagaggctttgtgaatgccaggaagatatatgacaactgcatgtattacacaggggaaatgaatctgcatcctgcggatccggactatctgacagagagtttgagcggcggaaatgcccagaaagtcatcatcgcgaagtggatgaccacggacgccgatatcattatatttgatgaacctacaaagggaatcgacgtgggtgccaaggcggagatataccgcctgatggaggaactggtagccggaggaaagtccattattatggtgtcctcggaacttccggaggtcataggaatgagcgacagggttgtggttatgagggaaggcaaaattatgggcgttctgaaccacgatgaactgaatgaagaagtcataatgagttttgcgatgggaggctgactatgaagaatgtgataaagaaattttcaagggaattagaggtagttgctgcactggctgtaatcatggtggtatttggcgtcatacagcccatttatttttcgccgtccaacctgcttgatatcctggaccagtccgttatcaatggtcttctggctatcggcatgactctggtcatcatcacggccggaattgacttgacagttggctccacgctggctattgtaatcgtaagcgtgggtaatttcctggtcatgggactgaacccttttgcagccgtccttgcaggcgcggccattggttttggtctggggcttgtgaacggaatccttgtggctaagatgaaactgcagccctttgtggcaaccctgggcatgatgtccgtatacaggggtgttgcctatcttataacagggggctggcctgtacttaatattccccagaatttcagggatatcatggatggtgatgtaatcggcaccctgtcctcgtccatgattctgttcctggttgtgacagtggctgcctatatcctgctgaagcacacaaagtttggcacctacctgtattccattggcagcaacgaggaggccacccgcctgtccggcgtcaatgtggatttcaacaaaatcatgtcctatgcaatctgcggtgtctgtgttgcatttgccgggatggtcatgctggcaaaactgggaaccggcgaaccggcggccggagccagctatgagaccaatgccattgccgctgcggccattgggggcaccagcctggcaggcggtaaaggaagcattataggcacattcctgggagcaattcttctacaggccctgaaggtagggctggtggtctgcggtgtggatacattctggcagtatattgctacgggtcttatcatagtgtttgcggtatatgtggatgtaatacagggtaaactggcagccatgagactgaataagaaggcaaaggcggaataaccgaataagggggtctggacagtgagagattgcgagagagagtacatttgcgtcatcggcagccttaactacgatatcattatgaagcagaagcggatgcctcttcagggggaaacatacaccgccgacagtataacctactccggcggaggaaaaggcgccaaccaggccgtgcagtgcgccaagctgggaatcgacaccattatggtgggaaaggtgggaagggatacctttggcgacagcctggtggaaaaactgaaggactatggtgtggactgttcctgcataggcaggagcagcagccccacgggtgtgggcgtggttcatgccctggaggatgggactgtatatgcttccatcattacaggtgccaattttgatattacatcccgtgaaatcgacggattggacgagcttatcaggaacagcaggattgttattctccaactggagatacctacggaagtggtggaacatatcatccggaaggccaaacagtatcatgtatacactatacttaacgctgcaccggccaaggaaatggacctggaggtgcttaagatggcagactgcctgattgtcaatgagacagaggcatccttttacgccggagttgaagtgacggacggagacatggtaaggactcacgcagacaggctgaggcggctgacggagggaacggttattgtcactctgggctctaagggcagtatgcttctggggcaagaaggtgcggttgccattgaccctgtaaaggtggagcacgtaacagagagcacaggggcgggggattcctatataggggcatttgcatatggcaaatataagggcatgacggaccttcaggcctgccgatttgcggcccgggcagcctcagtgactgtgacaaaaataggagcgcaggaggccatgccttgcttgaacgagattaactaaagtctccgctccgcgtttggtctgttgaaaaaaatgaaaaaaagtgacagaaaatgcaagaatcatggttgaactaaggatgggctctttgatataataaagctattatagttcaaaggggtaagcatatggttcctgagttgagaaaagaagagatactgaaaagtatcaaaaagagggatatctcttatataaaagacctggcagcggaattgaacatttccctgtccactgtgcgcagggatgttgctgctctggaacaggaaggcagcgtcatcgtcatgcgcggaggcgcggttaagtataaggcagaggacttcgacgagcctgtggtaaagaaaaagctgattcacagcgaggaaaaggagatcattgccaggaaggcggctgcgctggtggaggacggagactgcgtttatgtggattcaggcactaccacggtggggatgctcaaatatctccagggaaaacgtatcaccattgtctccagcagcacggaactgctggacaatctgccaattaagaacgcgaagtgtatcctgctgggaggagaagtgcgggatgatttggaatccgtactgggcgccctgacggaaaagatgatatccgacatgtattttgacaaggcgttcattggcgccaacgggtatatcccggacggaggcatctacacctatgatgacagagaggccaggaaaaaggtgattgtaaaagaccattccaaggtggtctatgtgctcatggatacatctaagaagaataagtatgcgttttccaaggtgtttgatttgggggaggcgattctgattacagaggaggaagataacaggtaaagaacatatgtacgcggacgcgggcaggcagatgtgtccgtaagaaccggaaacgcagcgcgggaggtgactgcttctgcgatatagaacagttgataacacagattaacatagacgtacatataaatgaagggccgcatccaagacaacaatgcggccctttgttactatgggtatgccgtcaatcctggcatgccattttttagatatacgatattaacaatgctgatatggtaacctcacatcggttccttattccccaaacacagctttataatcagcctggaatttggcaatgccctggtcggtgagcggatgctttgtcatctgctccagtaccttgtaaggaacggttgcaatatcggcgccggccttggcgcagtcgattacgtgaatcgggttgcgtacgctggcagcaatgatttcagtctcaatgttgtgcatctggaaaatctcggtgatgtcgtaaatcaggtcaatacccggcatggagatgtcatccaggcgtccaaggaatggggatacgtaggatgcgcctgcccgtgcggctaagagagcctgtgcggatgtgaataccagggtaacgttggtcttgatgccttctgcgtgaagcaccttcactgcctttaatccttctactgtcataggaatcttaactaccatgttgggatggatggctgcaatctcacggccttctttaatcatgccctctgcgtcaacggtggtagccttaacctcgccgctgataggtccgtccacgatgtcggtgatttccttgatgacttcggcaaagttccttccctcttttgcaatcagggacggattggtggtaacgccgcagataacacccatatcattcgcttttttgatatcctcaacattcgctgtgtccacaaaaaatttcatagtaaataccctcctaaaatgtgtgggacaggctcgcctgcccgcttcctttttatctctaagtgtattatagcgcatatacatgctgtgtcaagcaaattattgcaaaaaagtgcgttaatatgcgatttttattagaatgcacacgaaaagctgccggagtataaatgaaataccgcaaaagtaccgcaaaaaatcgcaatgggtgatatgaaatgcccgctggctataaaaagtccagtcctttgttccggtagtccacagccatctcgccggatacgccgttgtccgtgattaatgtggtaaacgcctctatgccgcacacatgatatctggatacagtattcagctttatgggatttaccagggcaatgacccttcgggaggactgaatcagctgtctctttatgctgacctcatccgggtaggggatggtcatgccgtattcaggatggatggcatatacgcccataaagcaaagatctgggtggtagagcgctgcctggctggccgcggtttcgcccacattggtcatggattcctttaacagccgtcctcccaggacgattacatccacctggtccttcatggaacaggcgtgggcaatggaatagctgttggtcagcacggtcagcttaagaccgtttggaatgttcttggcaaactgaaggttcgtgctgctgccgtcaatggccaccagctggtccttctccagaaagtccagtgccttcagcgccaggcgctgctttaattccacatccgttgtctcgcggtcaaaaaaattgatgaccgggcgctccatgggaatggctccgccgaacacacgcttgacctgccccttctggtccagatccagcagatcgcggcggatggtatcctcggatacattcagctccactgccagtctgctgaccactaccttgccggaggagtgaagcttatttaagattaatgcctgccgttcttcttttaacatatcattccctgtccttttcttttatccattcttttaccagttccatccagccctgacagtgaggcacaaggcagtctccggtgctgtcggaaacctcctccgtagccagggacagtccgtggcgtccgctggaataaatatgcatttccaggcttacgccggcctttttcagggcctgggccagcagcagagagttttctgcaggcacggactggtcggtccaggtgtgccacaggaaggttctgggtgtgtgcggtcctgcctggagttccagggaaaccagttccctgagtctgggatcgccggccttgcctcccaaaagctgttcaaaggagcgtttatgcccaaattcgccggaggtgataaccggatagcatagaatcattccctttggctgcatgtcctcgggggccatattcaggggaccgtagaggaagtcccggttccacatcatgcccaggcaggcggctaaatggcctcctgcagaaaaaccgcataccataatccgttctgtatcaatattccattcacaggcatggcttttcacaagcgccacggctttggccagttccataagggccacgggaaaggtttccggggcaacgctgtagtgcagggaaaagacctggcatccagctgccagaaattccatggccacaggctggtcttccctgggggacacaaagccgtatccgcctcccgggcaaaggaccacggccgggcggagaagctccggcttatggggcaggcgatccaacagataagcagtcaggtccgccggatttccggattcccttgcatgtccgcattcctggtccgtaaccataatattaaagtgttttatattcatgttctcgcctttccggaaacaagagggggaaatgtgcaaaaaagctgtttccagtattattatactgaaaacagcttatgggttcaatcatttttgccgcctgttttgtgcagctgctttgcaccgctgctttttgctgcggtactatgcctctgctctatactgctgccttatgactggcagcggaacatggtttcgatgtaagccaggataaggggggcgattccctttgcttcgttttcaaccaccggctctctcatataatattcaaaagtgccctcccgcatgtccgtgttgcccagcccggcaaccaggcagatgccgcccagctggagactgccgtctttttcggagaggtatgtgctgcatatgccgtcaaatgccttttggccgtatttaaaatattcctcgggaaggtaatggagccgtacgcttttcatgatggcataggcaaatatggcggaaccggattcctccaggtagttgggagcaattccgccccggttcaccacctggtaccacatgccggtggcctggtcctggtagggaagcatggcatcaatcagttccttatagatggtgttcagccgcgccttctggcaggccatggattcgggcatgacttccatggtgtcaatcagcgccatggcataccagcccatagccctgagccagaagttctccgacagtccggtcaccttgtcgcaccagaacatctggcgtgagtcatcgtaagcatggtagtagagcccgttgaggggatctctcatccgcccgtatacctgaaggaactgctggtacgaatcttcgcagtttttacatccgttatactctgcctcgtactgcatatagaaaggctgggccatgtacagcccatccagccatatctggtggggataaattttcttatgccagaagtttcctgtggatgtgcggggctgttccttcaactggctgtatacagtatccatagctcttctgtatttttcttttccggtcagcttgtaaagatcgaacagggttttgccggcatttacatgatccaggttatactcctttgggtcataggactcaatggagccgtcctctctcacaaagcggccggtgaaggcgtccgcaaagtccaggtaccggtggtttctggttataaggaagagttcgatgatggccttaatcatgcagccgtcaatatagttccaggtggattttgaaccctcccggattttttcgatgttccatacagggcactcaggggtgctctgttcaatcagctggtcgatgtaacggtccagtattttcataatcttaactctcctttatacatatatgtacacgaagcctgatgtaaggcgtccttgtaaaaaatggaaatgtaaacgtttgcagacaaaatagctgtaatttagctcaattaaatccgggatataactataaattgagtgtattatgtctttgaaatccttaaaatccatttttttaatcttgaattcatcttaacataaaaaaagcagaaaaagaattggatatatta

SEQ ID NO: 3176 - DNA, 65068 bp, Unknown
  gut microbiota DNA sequence
taagtacgccagggtggaccgggcggaggaaatcgagtacagggaaaaatcggattttccggccaaggaggtattaagtcccattacccagtctctgttctatttcacagaggatgaattcattgaaagcaaggccggttccaagaagctgcttatattcatgcggccctgcgatatccacgcacagcatcaccaggaaaagatctacctgaccaacggcggctatgaggatatatattataaacgcatgaacgagaaggtaaagatcgtgatgatggagtgcggcgagggctgggatacctgtttctgtgccagcatgggaaccaacaaaaccgatgattattccatggcagtccgtttcggggaagacgggctggagttccaggtaaaggaccatgcatttgcctcctatttcgagggcatggaggaatgtccctttgaaccgcagtttgtggaaaaaaatgagctgacccttaccgtgccggagattccggataaggaggttctgacaaagcttaaagaacatcccatgtggaggcagtttgacggccggtgcatctcctgcggcgcctgtaccgtggcgtgcagcacctgtacctgttttaccacaacggatatcatatacaatgagaaccgcaatgtaggagagcgcaagaggacttccgcctcctgccaggtaaaggacttcaccgacatggcaggcggcatgagcttcagaaacagggccggggacaggatgcgctacaaggtgctccacaaattccacgattacaaagccaggtttaaggactaccatatgtgtgtgggctgcggacgttgcatggaccggtgtcctgagtacatatccattgtggctacagtgaacaagatggcagacgctatcgaggaaataaaagccggtaagcaggcataggagaggggatgcagtcatgaataatatagtgaagccagtggcatgtaagatacgcgaggtaaggcgggagagccttcatgaatatacattcagggtggagacagacatccgtccgtcccacggacagttcctgcagctttccattccaaaggtaggggaagcgcccatatccgtcagctccttcggggatggctggatggatttcaccatccgttccgtgggaaaggtgacggacgagatatttgagaagcagccgggtgacattcttttcttaaggggagcctacggcaagggatggccggtggagcagtttcagggcaaacacatggtggtcattaccggaggcaccgggcttgcgccggtgaagagcatgctgaacatgttctgggagcaggaggattttgtgaagagcgtgcacctgatcagcggatttaagaatgaggacggaatcattttcaaacatgacctggaccgctggaaggagaagtttaccaccatctatgccctggatacagaccgcaaggatggctgggagacgggttttgtcacagagttcgtgtcacggataccttttaaggattttggagaagactacagcgtcgtggtggttggaccgccgcctatgatgaagtttaccggcctggaagtgcttaagcagggggtgccggaagaaaagatatggatgtcctttgagcgcaagatgtcatgtgccgtgggaaaatgcggacactgccgcattgatgaggtgtatgtctgtctggacgggcctgtgttcaattatacccaggccaagtatctggttgattaagagaggggtggcgaaggaatgaatcatgatattgatataaaaaaggtaagaatcaactgtttcagacagtccaaggtggcaggggaattcatgctgcagatgcgtgtgccgggagctatgattgaggcaaaacacttaaagctggtgcaggacctctgcgagcgcttcggaaacggcaccttccatctgggcaccaggcagacctttgacatacccggtgtaaagtatgagaacatagaggaagtaaataagtacatcaagtcatatatccatgatgtggatgtggagatgtgcggcgtggacatggatgtgacggattacggctaccctaccatcggcgccaggaatatcatgtcctgtatcggaaacgcccactgcatcaagggcaatgccaatacatacgagctggccagaaagattgagcgcctgatattcccatcccattaccatattaaagtggctgtggccggatgtcccaatgactgcgttaaggccaatttcaacgacttcggcatcatgggcatcaacaagcaggtttatgacattgaccgctgtattggctgcggttcctgcgtggacgcctgcaagcaccatgcaacaggcgtgctgagcctgaaccagaacggcaagattgacaaggacgcctgctgctgcgtcggctgcggcgagtgttccctgatttgtcccaccggagcatggaccaggggcgataagaagctgtaccgcgtaaccctgggagggcgtacgggcaagcagaatccaagggcaggcaagctgttccttaactgggttacggaggatgtgattctgggtatgtttgccaactggcagaaattttccgcctgggccctggattacaagccggagtatctccacggcggccaccttattgaccgtgtgggatataaggaattcgtaaaacatatctttgaaggggtggagttcaatcctgaggcaaagatggcggatgatatattctgggccgagaatgagcagcgggggaacatgcatgtgatgccgctgtctgagcataagcacgcaggcccccaggaaccggcgaaaaagaaggcataggggatttgggattatcaacagcaacgaggaaattcaaacagcggggggtgtgaatacatgccctgctgtttttctgccgtttttgcgcaaagattggcggctccgtgatattttagggatagaaagggatactatacaaagtaagtacagacagcgcggaagaatatgcggacagccggaaattattagtgtacactaatttatacagtgacattttggggaaaatgtagtatacttctaagcgaaataaattgacggatatttaacatattatggacgaaaggaagaatgaatatgtactgtgtaaagcgcatcaatgatgatttgttctgggttggcggtacagaccggaggctggccttattcgaaaacgcctatcctattccgcggggggtttcctataatgcttacctgctgctggatgagaagactgtgttgtttgacacggtggacagggcaatcacggagcagttttttgagaacatagacgcgctgttaaagggacgtgccttagattacgtggtggtgaaccacatggagccggaccactgcgccacccttggggagattgtgctgcggtatccgggagtacaggttgtgtgcaaccctaaaacgattccgattatcaaacagttttataattttgatattgattccagggccattgtggtcaaggaaaatgataccctttgcaccggacgtcatacatttaccttcctcatggcacccatggtgcactggccggaggttatggtgacctatgataccacggacaagaccctgttctccgcagatgccttcggcaccttcggggccatgaacggcaacctgtttgcggatgaggtcaactttgagagagactggctggatgatgccagacgttattataccaatatcgtgggcaagtacggaccatctgtgcagaccctgttaaagaaggcgtccggcctggatatccgtaccctgtgcccgcttcacggcccggtatggcgtaaagatattagctggtacgtggacaagtatctgacctggagcagctatgaaccggaggaaaaggcggttatgattgcctacggctccatttatggaaatacagagaatgcagccaatatcctggcctgcaagctggcggagaggggaatcaggaacattgcgatgtatgacgcttcctccacccatccttccaccattatctcggaggcattccgctgcagccacctggtgtttgcatctgccacctataacggaggcatctttagcagcatggagcatgtgcttatggatttgaaggcccataacctgcagaacaggacggtggccctgatggaaaacggatcctggggcgtgctgtcaggcaagcagatgaaggaaatcatcggcaccatgaagaatatgacggttctggaacagatggtgactgtaaaatcctcccttaaggaatcccagatggaagaactggatgccatggccgatgccattgtaaactccatgaaatagcagtacccaatcagggacaatcgtgatttataacggtttgccggatggctttgtttgagccatccggtgttttattgtgatttattgtactttttgtgtatttttggttgtgaatattgcatttttttgtgaaatttagtagtatagaacatacatcccgtaatttagagcattgaaatatgggatgctcaggaaaatacaaatgatgcgagaggatatgatgacatggggattatgagactgattgaggggataagggcggggaaggcagtcagtgtgttttccggaaaccaggaatatttattttctgccggtaaaccgggccctgcctgtccggatggtttttgggaaattagcgtcagatgcaggccggaggcagtctctgaccgaaccgggccgggtaatggtccctttttatttttcgacagcagaaccaaccggtttctggattttaccgggggtcttctggaggcactgtttcccatgtcctctgaacatatctatgatatggctgtccttgaacaggaagtgaacctgagggtgaaccggtatattactcacaatctgatatataagatacaggaaggtgcggcaaaatacgggcgggaggagtttgatgaaggagagatacgggagcaggcatatgtatgctatatgaccggggcctggggccacctccatgtgccggcccgggcttttgacatggaacagttctgccgtatggacgggcgccgctccaggacaggagaagggccgtttgtggaagcgtatgcccgtctcataatgcttcatttaagtgaacagtttccatccggcgaagtggccagaagctttctggaggatatatgcagaaaagatacgggccgccagcgcaactacgatgtcatctgccgtgaatatgcaaaggacagctttgtggagcaggagctggaacatctgatgcgggaggcaactgacagcatgaagcgggccaagagcctgtgccagctcttaaaggcgaaatgcagtgtgaagccgcaggtggagctggaccaggagatactggcggtttcccttgcttcagactgccccggccctgttataggaaggaagcgggatctgtattactcctgacggcaaccgtacggcatgcctgccaggaggtgcaggacgcatttcagggacgcgcctgcaaagggggccggccgttgacggaccagggacaggatggtacaatatggatagctataaggaatgacaggaggacaggaatcatgattagaagaaaagacgagatggagcccgtgaccaggcatgagctgcagaaggggatgggggatgtgaccttccacaccttcatgacaaaggaggaggcctatggttcgggcaggacctttgctcgtgttgtgtttgagccgggtacatccattgggatacatgagcatcatggggagtttgaagggtattatattctgaaagggcaggccctggtaacagataacggtgtggaaaccgtgctgaatcccggagattaccacatgtgcaaggacggggacagccacggcattggctgttacggggatgaaaccatggaaatcattgcccttattatcaatgttccggcataagagatgccggaggagagattttgcccgggacattggacggggctgtctgctttggaaggattgtttgaatctggtttctggcagacagctctgtatttttgactgaaacatgtattttaatacatggaaaaactgtagtataatgaataatatgttgtatttttaaaatcactgtagtaaaataatatttgattatgggttttcagacccatgcttgcgcatcatctcggccagacagcgtatgacggggagaagttccagggcttccttttcgctcaggctgtggagctcccagaacagctgctgtttactgtcgcccatggactcggtttcagggtaaaagatacggtcggcgggaattctcaaagtggttaccagaggataaagcacctcgaatttggggtttccgcggaaattttctatattaataatggtacggacatctatacccagcttctctgccagggaagcctgggacattccctgttcttcgcgggcttttcggatgaccgtacctaaagttttaacgtagtcatgcattgtgattcacctcaatactagtgtacactacacttcttatattatgaatcactatgcaatacatataaaatatgaattgagatacactaaactcctggatggaatgccgggagggggaaaggaagttttgcatgggtgaagggacagaagacagaatgcaggtgtacataaaacatgtggtactggaaccggggcttgaaatggagtatgcacagccgcttctgacattatttgacgaactgctggcctgggacctggcatcaggggacagccgcattatattttacacagagggcaggagccgtctgcgggagaaccggacagagcaggaatttcaggcatttgcctggagccatgtacatccccgggagtgcaggcagttccaggcgtttttcagcgccgtgcacatgaaagaactttacgggagcaaacatcctgagaagctggtttaccgccaaaggacggcagagggaggctatgtgtgggtggaggtggtggccataacagccggcggcggaggtacaatgctgtgttatgtccgcgatatgggaaaggaagaacagaagcggtatatacaggagcagattattgatcaatatgtgtataaaaaatgcgatttcttcctgtgtttggatggagacacgggttactatgaaatcctgcagaaaaatgacagccgtattcagggacagatgcctcattcggggaattatgagcaggagctggaggaatgtatcaggaagtatgtggtgtctgaggacagggacctgcttctggagaaggcatctatgaacaatgtcctggatgtgttggagcgtgaaggcgagctgatggtatcctatggtgagaaggggacggacggccggtatgcccgtaaattgcttcgctatgtatactttgacagacaggagcaaaaaattctccttatgcgccaggatattacggcagagtacctggagcagcgcaggcagaagaagcgcctcagcgacgccctccttcatgcaaggattgattcccttacaggtttgtataaccgccaggcagtaaatgccaagatcaatggaatccttaggggggccgcagtgatgcccccttctgtgctgctttttattgatttggataattttaagacagtgaacgatactcttggccaccggtatggggataaggtgctgtgctctgtggcagagtgcttccgccaggtcctccgtacttccgacataatcggaagggtgggaggcgacgagttcgtggcttttctctcaggagtcacatcacttgatgaggcaagggagtgcgccggacgtctgtgccaggcggtgagccgcataccggatttagacctgaaaggctgcgggctgtcctgcagcatcggaggggctgtgtgcccaagggacggaagggattacgattctcttctcatgaaagcggatatagctgtctatgaagccaagcgccggggaaagaatcagttcgccttttacgagcccggaatgaggcctcattccgagccctgacctgtgcgggcgtgtctagcccaccacctcaatgtgataggttttcagccagaagttgacctggaggagataggccagcatctgagggccggccatgagctggccgtaccatggttttccgtagtcagaggggctggtgaggaagcgggccagttttttccggtccaggaagtccattaccggggagtggctgtcgtccatcatttcccttacacggtccacaagcagtttttcataggcggtatcataggttttaggatagggggactttttccggaacagtatttcatccgggagaagtccttttcctgactggcggagcaggttctttaccagtccgtcccttgttttcatgtcccagggcacgttccagacgtattccatgattcggtggtccgcaaagggaacccttgcctccagcccggagtacatgctggtgcggtccatgcggttgagaagggtctgcatgaaccagcgcaggtttaaccaggcgatttcccggcgccttgcttcctccggggaatcctcttccaggacaggggtctctgccacggagcgctcataggtgtccagcacataccggtccatgtccagatactctaagaagctgtcatccaacagggcctttctgggggccaggtccatggtccacgggaaggtatgggcttcaaaacattcctttttatggaaccatgggtagccgccgaatatttcgtcggcgcattccccggtcagggccaccttgttgtgttccttgaccatggagcagaactggagcatggaggagtcgatatcccccatggccggcagatcatgggccaggacagaatcaaacagacggtcagcctgggtcaggtttccgcactccaggtaatgatggtcggaatccaggaattttaccatctggtccacataggggcggtcctgggagggctggaaggagttggcccggaagaacttatcgttgtccacaaagtcaaaggagaaggtggtcaggcgctttccctgctttttcagttcctttgcgcagatggcagacaccaggctggaatccacgccccccgagaggaaggtacagatgggcacatctgaaaccatctgcctgcgcacggaatcctccaccagaaatgatgttttctcaatggttcgttcatagctgtcctcatggggacggctgaccagcttccaataactctgctggcggattccatcaggggtacatatgaggtaatggcccggaagcagttcctccatgtcctttaggacgccgcagccataggtcctggcaggcccgacggagaacacttcattcagtcccctgaggtctaactgcgccttgacgccgggataggccaggattcctttgagctcggaagaaaaaatgagttcctcgcctcttattgtatagaacagaggttttaccccggcccggtcccggaacaggcacagacggtttaaggccgtgtccatgatggcaaaggcaaagataccgttcaggcgttttacaaagtcagggccgtattccatatagcctgccagtatgacctccgtgtcgctggaggtctggaaggaatatcccgcggccataagctcctggcgcagttcatcggtattgtacagttccccgttgtagacaatggcaaaggtctgtccggagcctgatttcaccatgggctggtggcctccggccagatctatgatggacaggcgggcatgggacaggccgccgtgttccgagagccaccgtccggcgtcatcggggccacggtggcgtaagcgttctgccatggcctgcaggacagattcatagtgttctttctctttcaggtaatggtcatgagggttataaaaaccggcaattccgcacataatttattcctcctgtcatgatgtggaaatgtgtttggtgttaaagcataaagcatgccagggcaaaggtacaggcaaagccgatacagaccggtatcaggtttttcctggccagttccagcgggcttacattgcagatggcggcaaccgggatgagtccccacggcacgatggtgccgccgcccacgaagatagccgcaatctggcccagggccgccatgaccggaacagacgagccggtggcggttccaaaggttctggccagggcgccggtcaggggaaggcctgaaaaaccggaaccgtccagacctgtcagtccgccgaccaccatctgtataaaggccgccatatatttattaaggggggcattctgcgccagccacagggcccagtcattcatgatgccacggttaaaccgttcccccatgatggaggtgattccatcccctcctaaaaagaaaaaggcaccgattataataaccggagcaaagatgcggatggcaaagagaaaaccttcagtgacatagcccgtgaccttttccagggactgttttccaaagcccagcaaagcgcccaggcaggtgataaggagagcggtgccggagaccatgctggtggcatccccgcccttcaggccgcacaggagcatgagaataatatctcctgcaaaggcaatcggggtaaagacagccaggaacagggcggccttcttatgtccctggggcctggagggttctgcctgtatggagagcctggggcccctggcatccagctggctcctgtttaacacatatgcgctgaggacggtgacaatgcccatcatccagaataaaggccatgcctgccggagaatagaggatgtgtcaaggcctgctgcgcctgctgagatagcgggagcgccctgaattaccacatcgtagctcagcgcaaagccgtgtccgaacaggttcatggccatggctgcggctaagggattcaggcctgcctttacagcaaagggcagcatgatggcacccaccagtgcaacagagggactgggccacaggaacagggaaaacaggaacatggtaagccccaggatccaccaggtcagggaaggtgttttcataatgccggccatgggaaccatcatcagatagtcgcttcccaggtccttcaggcatttggaaagggaggtgaccagggcaatggttgccagcacctccatgaattccctgcctgcgtagagaacagcggaaaatacggttatgatgccgccggtaacagatttaaggccgatgaggcccaggataaacaggaaggcgatgcagacggcaggcgtatcctttttgaggaccatcactgccaggataacaatgacgcctatgagataagcgtagtggagcggagtcagcactactgcggattctatcataataagtcactcctgtatttatggaatataatctatgatatggggaaatgctctcctccgtgaaaaggaaatcaggaaattaggggttgattttatggccaggtgctggtatgctagataaggattaaattttaaaatgaaaggaagtgaaccggagtggaaggtcgaagtcataagttggaagcagacaattatcataagcgtttggtagtgggagctgcgtcggcggctttgatcccgctttgctttcactgccgttaattataggattcatatgcgtttatgatgatagccattattacaggaggagtctgtaattatggctgttttgttgttgcggtccggccatccagggcaggactgcggcattttgcgtgctgctttcatgatgtcaccattcatggaaggaataagatgcaggagaattttgatttaaaagagctgatggagctgttagacacaatgcagctcaggttactgaaggaaaagctgattgagatgaacgaggtggatattgctgcgttcatcgaggagctggattccgagaagaccgtagtggtctaccgcatgcttcccaaggagctggcaagcgatgtgttcgcctgcctgcctgtggagaagcaggagcatattatcaacagcatcacggattatgagctcagcgccattgtaaacgacctgtttgtggacgatgccgtggatatgctggaagaactgccggccaatgtggtcaagcgtgtgcttaagaactccacgccggacaccaggaagctgatcaaccagtttttaaaatatccggaaggcagcgccggaagcataatgacggcagagtatgtgggcctgaagaagcgcatgaccgtggaggaggcatttgcctacatccgcaggcacggcgtggataaggagaccatttacacctgttatgtcatggacgcaaagagggccctggagggtgtggtgacggtcaaggatctgctgatgcatccctatgaggaagtcatcggcaacatcatggattcacatgtgatcaaggccgtgaccacagacgaccaggaggaggtggcggagagcttccgtaagtacgacctcctgagccttcctgtggtggaccatgagaaccgtctggtgggcatcgttaccgtggacgacgtggtggatgttatggagcaggaggccacagaggactttgagaagatggcagccatgctccccagcgagaagccttatcttaagacaggcgtgtttgccctggcaaagaaccgtctggcctggcttctgattctcatgatcagcagtatgattacaggcagcatcctggcaaagtacgaggccgcctttgcggtgataccgctgctggtgaccttcattcccatgctgacagatactggcggcaacgcgggcagccagagcagcaccatgattatccgcggcatggcagtgggagagattgaagccggtgatatcctgcgggtactctggaaggaactgcgggtgggagtcattgtgggcgtcctgctgggactggtcaattatatacagctggtaatccgttttccaggacaggaaatgctctgccttacagtggtactgagccttttagccaccgtcatgctggccaaaaccattggatgtgtcctgcccattgcggcccaggttctccatctggacccggccattatggctgccccgcttatcaccaccattgtggatgcggtgagcctgattatatattttcagctggcttgcagcctgctgaagatttaggaagaatgttcagagccggaatcttgtttctatacaggattccggccttttgcttttggatggtttccggccatttggtccccggctatttggttctctgtcctattttggccccacaatttgtaaatcctcagaaccctctattgacaatggggaacagattttactataataaaggtaagttataaaacatgtttcaagtctttgatatctgtccccgcgtccggtttcagcagaacttatagtatggaggtgtcgtgttttcttgaggtgcctccggtcttataccatatattccatcaagaaagagaggtagttatatgaaccaggaacagctaagaatcatgagcgggaaaaaagggtttatcgcagcgttagaccagagcggcggcagtacgccaaaggcgcttaagaattacggaatcagagaggaccagtacagcaatgatgaggagatgttcaatctggtccatgagatgcgtaccaggattataaccagtccctcctttacctcagaccatatcctggcagccatcctttttgagaataccatggagcggaagattggggataagctgactgcggattacctgtgggaggagaagggtatcatccctatcctgaaggtggataagggtctggcagaggaagcggacggagtccggctgatgaagcctgttccggggctggatgaactccttgtacgtgcggtggagcggcatattttcggaactaagatgcgttccgtgattaagcaggctaaccctgtgggcatcaaaaagattgtggaccagcagtttgaaatcgggcttcgcattgcggctgcgggactggttcccatactggagccggagattgatatttacagtccggataaggctgaatctgagcaaatcatgaaggatgaaatcaagaaacatctggcagcgcttccggaggataccaggctgatgtttaaactgtccattccggataagcacggattctacagcgacctcatggaagattcccatgtagtgcgtgtggtggcgctgtccggcggatattcccgccaggaggccaatgagcgcttaagccgcagtccgggactgattgccagcttttccagggcattgtccgaaggccttaatgccaatcagacccagggcgagtttgaccgtatgctggcccagtccattaaggagatttacgatgcatccataacctgagacagggaggctccgctattgctgcggagcctttttgcgatctggaaacatagggctgggtattgggcttattgggtgtatttggcggacggccttctgtttacaaggactgttataaatggtatcatataaaaagatgtgatgaaaatgtatcccggtaaaaggatgcagaggcattgagttatgacaagaggaatctatgaaacgtaagttaattggaaaatggcatgttgccgcttttttggtgttctgctttgtgttcgcactgacagccagcggtgttttttacaatcagcgcgggaagctggccggggaattcggaaacatggtggcagcgaacctgacttcttatacccaggcccaaaagcgttacctgaacagctccatcacggatgcctggaataccctgaaagggatttctggtctggtggaacagattataccggaatatacggaggattccctgaacggatatctggatcagcttaatttgcagaacagggactatatgatagaatatgtgaccctgcaggagctggagagaaggctgagggttcagcaggcgtcggaacgtgactggagcctgtttggtgagattgagcagggaacaggtgtggtgtccgatatatgggactggaagaaggcgggaaacaagtctgttttcacggtagcggaaccggtctggaagaatggagaggtgattggagtgctgcagaccagactggagcccctggccatcacggaacaggttcctgaggcaagcgcatttacacgcagcagcacactcattgtgagacgtgatggaacaattcttgccagtgagaatcacaaccgtggtgatatatccacagggaacctgtttgattcggtaaaggtagccggcattacggatgaagtagtggagcagatggaagagcgcttctatggagacgggtcagacagcttcatgtttgaggggaagggggattcctactatttttcctgggattatctggggtataatgagtggtatatcgtaaattttgtacgctcgcctgatgtggccattcattatgacaatattttgaaggagcttatctatgccagcctgtttctgattggccttacggctgctctgggcggcggaatcgtggttttgttcctgcattaccggagaagcctggactttgagactaagaagtacggacttctggcggagttttctgatacggccctttttgaatacgacaggagaaaggacaccctggaatttaccaacaatgccaggcgcatcctgatgctggatgagcttaaaatcagccatgtcatgggaaaaaagaccaggacagacttgtttgtccaggaggacaggaaggttatggaggatatgctgagaggcagaaccggcagcggggaggacaaaatccagtatgcagaactgcggcttaagagtatatccggcgagtatcactggttcggatgtcattataaggccattacctctgatgcagggacagtggccaaggtggtgggcaagctggcggacatttcgcggcagagaagcagggagcaggagcttcgggaacaggctatgcgggacgtgcttacgggaatctacaacaaggcaggtgaaaagctgattgaccgcatggttaaggaaaaaggacagggactgtttctgatgctggatttaaatgattttaagagcatcaacgataccatgggccatgcggcaggggatgccatactcactgagatgggaagagtccttaagggagcctgcagggaaaatgatatagtggcccgcattggcggggatgaatttgtcatgttccttccgggggcatttgactggcagacaggaaaacgcaagataggggaaatacaggacagtctcaggacagtcatgataaccacctggggaatcaggggaatcagggccagtattggcgccgccctgtgcccggaggacgggatggattacgagaccttatttaaggctgcggacgaggctatgtatctggacaaggagcagtccaaaaaccggaatgaaagcagggaggcaggagaggaaaaacaggacaggacaatatcatgacacagcaggaggaacaggacatgaagcacggatggggaagtgtaattctgtcaggcggacagggacgccgtatgggcggtattgacaaaggaggactggactataagggagagtctttttgcgggcatatacagaagcagcttcaggccctggacatcccgtgctacctgtcccgggcctgttatgcaggcagcggtggcagggaaggcggactggaagtgattgaagatactgtaaagggggcagaaggagagtggattggccccatgggcggtatatggtcctgctttcagcgcacaggacttgatgggctgttctttgtgtcctgtgatatgcctttattcaggaaagagatggcggctattctgatggagcgctgggagccgggggcggatgcggtgctgtggagaaccagggacggccgtatacagccattatgcggcttttacgcggccacctgtctggaggcgctgggagacacgatccgtcagggaaattaccggctgatgaagttcctgaacgctgtgcgctgtattgtggtggatacgtcagaggcccatataccggatatctggtttgccaatgtgaattcaccctccgcctacaggagcctggaagggctgcgcacgcctgtcctggctgtaagcggcagaaagaacaccggtaagacagcccttttggaaatgctggttggagcgctggacagggtgggaatccggtctgcggtaatcaagcatgacggccatgagtttgaggctgatgtgccgggaaccgacagccggaggataaaggaagcaggggcatacggcacagtggtgtactccggcaccaaattttccatgacaaaggagcagccttccatgaaggcagaggatttctttggtttcttcccggaggcagacattattttcctggaaggacagaaagattcagattatccaaagctggaggtactgagaagggaagtctcggatgtcccggtgtgcaggccggaaacagtgctggcttatatctggagcgggcagattgccaggagtggggagaacacctggagcggggagaacgccagaagcggggaagattgcccgggcaggggtaaccgccggaatgggaaatgtcccgtactcacagccgctcagaaagactgcatcctggaaatcgtgattgagcacatggacaggtactgccggggagacggcggtgatgagctatgaccgttaaggaagcagtacagagccgtacccgtcagcttctgaaaaactttttcttagtccggatagcttctttccatttacaacaatcattcaggtggagcattacatggcgggtaggcggcataagcagtatgcccgccacatcctttttttcccagaaatcaagcagccatatggaggtttcctgttgtgtaactccgccaacggacaggattttctctatatcatcctgccggatctggcgctttaaatcagcggcacttaagctgcggattatgtcccttgtcgtttgcgccacggcatttctgtaacaaatcaattgctctgtattgacatttctgctaaagtctataatctcatcgtcagagagtgcatttccggtatctgtaatccgggcattcagccgttctttccagtcctggttgaacacctgttctttccgggcgaccaggatgttcatggtcaaatcttcgattctggcgatatgccacaaaccccacgcaatggtttcatcttttcctgtcggcatgatggcatattcgttctgtttcaaatcacataaaagattatccacctcgtttttgtctgtaccggataccacagaagaatgcagctttgcatgtatttgcagaaacaggtcttttgagcgttcggtctccgaagtctttcggatgatgctgcttaattctttgtgctgttcacttaatccgcggccaaaatatttcattttttttactcctaaagccgaattgatgaatccattttatttttcaggaaattcctgtaacatttcatatatgtcatcgccggcgctggtgcatagtttcttagatgaatttttacggtcgttctgtctcccgtaatggaattgtcttaccttttatatggagcctgtgacttatatacctaattctaatatttggggatgtatctgtcaaatgcaaaaatattttattatggcaatatttttatgcagaaaaagatgatagcggtgataacaagacggaagattttcagtatcaggtttgaacgctgttttaatatattcactcttgtaggatccgattccctgtgataaaataaagacaaaaataaaaaatgtttttatttaaaagaggggaaacgatgcctaaagtcggttattctgaaaaagaacgggtacaaatcagagaggcattaattgctgtggggctggatttgatgacaaagcaggggatacagcacaccacggtggagcagatctataagaaggtgggtatatcacgcactttcttttactctttttttccgaataaagaggagctgattgtggaggccctttatctgcagcagccccaactcattgaatatgcccggaaactgatgaacgatccagccataagctggagggataaggtgaaaacgtttctccactctctatgttatggtgaaaaatatgggatcgctgtcttgacgatggatgagcagcgccttatcttcaagcgtttatccagggatagttataaggtgttcagagataagcaattaagccttttacatgcaatattaaatagttttgagattgaagccgacacagaacagcttaaattagtgctcaatctgacgttattaatcgtgattacatgccgggctctcccagaaaatttaccattactggtttccgaggcttctgatgggactgcggagtttcaaatggaggcgcttgtggattaccttgaaaagctaaaatgtaaaccaatcttataaaaagataaggcacctgcatctgcttatttcctcgcatttggtatgacacatccgctatttcccgtggataaataggggaattcacataataaatggctgtggccataattggtttcagcttaatataataaatatttaattacaggaggaaacaataatgggaatttttggtaagctttttaaaggacctgaaattgatatggtaaaaagcaatgcaaatgcaaaaaaaatgcgtgctttgtttaatcaggctgtagaaaatggggacgattaccgattgatctttggctttaccgaagatgtaagccgttttaattatgggtttgttcatggcagcaaatcgaaaataggaaatcttcttgttggctggaatgaggtaaaccagacgattgtagttgttccaacagtccctgatctttccggatgtggtgatccaacctattaccgccggtcggaaatcctgaaagcataccggaataagtaccccacggatgcctttatcatttatcccgacagaaagagttatattggcatcaatgcctacgattggctggaggatgaaaaactctatgtgtatgtgtcgcaggatgaagaactggctgcttttactgaattctttaagacgcattttgcaacgaaatgaggtgggagataatttggggagaaattgaagcattcttactggttcctgcagtgctatccgtgttcggtcatatctggtttcacctggtggaggcattgctgggggaatggttcattcagcggtataatatagatgtaaggtcgtcgaaactgaaaacagaagaaagctttcattgattatccgggaggacatatgtataagatgtatttagttacttttttcgccagcacatttcatattttgaggtttattgctctggttttaattatagcatgctgcattaaatatttgaaaagcagatgagatgtgtttcagggagatctgcaaagggtacggatagccggggcttctgccaataagcagaagcccgttttttatatgcacagcaatctggatgaagcaataggattatcggatgatacttactgagtttacatccgcagatgtgtggaagaagaatctcctttcgaagggggaaggagatacatggtgcagatatagataatacaaaaaaaaatatcagagaaaaaagacaaaagcaaaaagaacaaatgttcgaataaaatgttgcggtttacagatgaaggcagtataataaaggagagtggattgcaataatagaataaacagaataacaaatttaagaaaagaaacaaaaaacaggaatggacatcctggggaaagggagtataatcgtggaacagcggatctatatcgtcatagatttaaagtccttttacgcctctgtggaatgtgtggaacgggggctggactccatgacagccagattggtggtggcggacccggagcggacggaaaagaccatctgcctgtctatttcccctgccatgaagagactgggaatccataaccgatgccgcgtctttgagattccaaagagtgtggattacatcatggcacagccccgtatgcagctttatattgattatgcagccggaatttacggcatatatctgaaatatatctcaaaggaagatattcatgtgtattccattgatgagtgttttatggatgtaaccaattacctgcccctttaccatatgacggccagggagctggggcagaccattatggctgatatttttcgggaatatggtattcgggccacctgcggggttggcaccaacctctacctggccaagattgccctggatataacggccaagcattccccggattttatcggagagctggacgaggaaacctttcaaagaactctctgggaccacaagccgctgacagatttctggcgcattggaaggggtattgccgcaaagctggaaaagtatgggattcatacggcgggggacattgccaggactgatgaagactttttgtataaactgtttggcgtggatgcggagctgctgatcgaccatgcatgggggagggagaccgccaccattgcggctatcaagtcctataaggccagaacaaactgcctcaccagcggacaggtcctgggatgcgattacagctttgaagatgcaaagctgattgtgaaggaaatgatggatttgctgtgtctggagatggtggaaaagaacctggtgtcggattcagtgaccttacaggtgggctattccaggcagctggcagttgaatcctccagaggaacagcgtccctggacgcggagacaaatgcagatatcatcctggttcccgcagtgtccgccctgtttgagcgtattgccaatcctgatctggccatacaccggcttaacatttcagtaaaccacgtgattgaggaggagtacaggcaatacagcatgtttaccgatgtgcaggagctggaacggaaccgtaaactgcagacagccatgctggatataaagaagaagtttgggaagaatgcaatccttaaagggataaatctgcaggaggcgtccaccatgcaggaacggaaccagcagattggaggccataaaagcgggatttataaggatggcgggaacaaaagcaaagagcgcggcaaagagcgtgaaggcgcagaacacaaagccggagggaacagagatggcaggtagaccaagggcaaagatgtctgttcaggacagggcaaaacaattccttccgtttgcagcccttaagggactgccggaagcactggcggaaaaagagcgggtagtggtgcccaaaatcattctgacagaggacatgtctgaagaactgaaccggaaaatgcagcagattgagccgggaatgataatcggtgtggtttattttcataaagacgaatacctgaaggtgaccgggatggttgcccggttcaatatcagcagccgggtccttcaggtggtaaatacgaaaatcagctttgacgatgtgctggatattgaattttgccggtgattttattgatgccgcagagcattgcctggtcaatggctgcctgtgccttatcacggccaatccggttcctgtcaccggaaaaggccggcagccggaggctgcccggcccaggagccgaaatattcttattttctgcttatctgaaatcagaacccattatacagggacactccacagtctttcgtcggagagtacttccacaaggcgtttgcagtaagcgtccgccagggcaatccccttttctttggaggcagcacagctttctcccataattccgttttcagtgtggctttccatgtaatggaaggtggagagggcgccgcagtcctcgtaatcgctgcatccaccaggattcccgctcaggttagtgtagctgggatccaccaatgattcatcataggccagtatcagggaagtctcaacctctccggaatgaatcatatagttctgtttgtccaggaaaggcgattcatcaaccccggccgtatatggaacgttgtatacagggaatcccagctcctggttaatatcaattaatgccacatcaataggcgcggtatttccgccgtgtccgtttataatggcaattttccggaacccctggaccgcgattgccctgcactgctcctttagaacctgtataaaggttcccggtgtaagactgaggcttccggaaaaatgcatgtggtgcatggaattggcaatgacaaaggcaggagcaatcacaacaggaatccctttatcccacatctcttttgccgcgcgctcagcaatccactgggccagtatggtgtctgtagccacgggaagatgggggccgtgctgttcaacagcccccattggtatcatcaccacagcattcttttcagcaagctttttcagctccggcgcacgaagctgttcccacaataattggtttttcatatgattatcctctctttgcttataatatattgcgtgatatatgtatttcaattgctatatggatttaagttgccatatggatttaaagggtctatggaactaaattgctacaataagtattgcatgtgaaaaaaattatgtcaacgtgaactgtttcacaaatataagagaaaataatggacttttttacattgttgtattcattcaaaaaaactataatattcctatatttatagattttttattacttctggaggagggttttcacatgccaagggaaattcagcaacttgtcaacagccctatattatggatgattacacttatgtccattgcactggtattaggtatggctgcctattttctggttaaaagcatcaaggtggctaaaagtattggggttacaaaggaacaaatcagcataacggttaagacggcaggcatatctgcggtggctccttccgtagtcattgcagtgggcatgatatccctgctggttatggttggggcgcccactgccctgctgcggctttcggttgtgggaaatgtggggtatgaactgcagtctgtgggaattgcggcagatgcgtttgggacaactgcaagcgcagccacattgacgccaggtatatttcagacaaccgtattcctgatggcattcggctgtatcggatatcttgttatcccggcccttctctgtactaagatggataaggtgatccggaaaatcagcggtaaggacgcaaccgtggcaactattatttcaacggcagcgattctgggctgctacgcatatgtggacgccccttacatactgaaaatggatgcgtccacagtggcgctggcggggggattcgcggtaatgcttctgctgcaggccatacagaaaaggacaaggaaaaaatggcttctggaatggggactgttaatttccatggctgccggtatgtgtttgggattattcgtatagagcggaggatggaaggatgaaaaacgaaaaggcggaaaaccaaaagatggaggatgtatataataaagaatatctgccctcaattgtgagggttggacggtttgtattattggcaagcacattatttttctttgctccatttttatatacctggattggatggggggtcatgccggattggccggctatcgtaaagggcacttttgcctggctgctgattaaccttccgtggtggatatcggagccggtggcttatttcccggtacagggcgtcacaggcatgcttctctgctcactggcgggaaatgcatccaatatgcgtatgccctgcgccataacagcccagaaagcagccggggtggacccggggacccaaaaaggttcgctgatttccaccattgccatctccataacatgctttgtcagcattggtatactggctgtagcggtctttgcggggcaggctgcattaagccggcttccggcgtctgtatccaatggattgagccttctgctcccggcgctgttcgggtgtatctttgcccaatttttgtctggaaatgaaaaaagcggcgccttttccatcctgacagcacttggagtactgcttctttataaaaaaggctttttaagcgccatcccggcggacggaggaagtattattgtcatgcttgtgccgatattgggaaccatggcctttgcctatgccacggcgaaaaagaaaggaaaagaaccggttatttaataatatagcaatgcatatttattctcatatgcattgctatatttttgttttgaaatattatataatggagtaaattagacgctgccctgggctgcctttagcacagaagtaaatgaaatcaaattaatgattttttcattggtgacaggttccttaacaaatatgattttttcaatgctttatccaaatagccagagtataggaggttcaccggtggtttttagtttaattgctttaatggcagttcttcaagtggtgaggaaagatttgcctgggtttaacctcaatacagcatacgggcaatggattgcaggctatgccatcttaagtaatattccagtattttctaaaaacagttcaacgttggttattcattcaatcgcattttctgtggcttttatattagggattataggaatgaaaataaatcttatttagctgcacaacgattgggttacgaacaggagaggggatttatggacatcagaattctattggaagtgttggataccagacaaaatcagtacaaatataccggccccatggaagggcaggtatacggggtccaggtacagaacggctcttattcttatttggaggggatgctgtatgttcagccgtcccttacccatccccgcccgcctaaaaatacctgtgtcattgcgggggaaacagatctttatgaggtgctgcagaagatacttctgaattataaccgcaaggagtccctgctcattaagatgcaggacaagttaaccgcattccgctcatcggagacagacatgatttcgggggtcatggataatccgtgtatcctgctgcgggaggattataaaccgctggtatggaatgggtttgatggggaagatgaatttttgtggattgccagcattgattttaaggcagtgtctaaaaagggacagcatttgaatatatgttatcaggagtgttccgatgaaatcccgtatccattgatgattgtccattataccaatcccagagggaaaaagcggtattgtgtgctggccgaaaggaataccaggtttgaccgggtgacggatcccatttttctaaagaaaatctgtaatatcctgcagtgctatacatttaccaacaatggcatcgtacagccaatctcacggctggacgagctgttggagggaatgatccgaagaattcccgcccagccggaactgatgctcaatgagctgttaaaagcaggatgggtggaaaaggaaaaatattatgtgctgctgattgatgtgagcctgggcaagacaaaggtcaacgacgtgggggaactgtcaaagagactgaacgccagggtgttcagccacgaaaattactacgtgtgtctgctgacaggcacttgtgcggaggagtatgattccaggacccagctgggaatagaggatttcctggtggaacggaatttttatgcggggttgagctacggattttttaatattgtgaatatttccattggatataagcagtcggtggaggcaatcagggtgctgtttaacacgttaaacggagtacattattacgcgtttgcggacagcattgtgacgtatcttgtgaaaaccagtgtgaactgcggagaatttaccatggaaagcctgtgccatcccagcgtgtataagatttttgagtatgataagaagtatgggagtgattacatgaacttcctgcgaatctatatctattccggcggaagtgtgaaaagaacggcagaggcgctctttatgcataagaatacggtttaccagaagattgaaaaattaaaggaatttttccacgtggatgtcaacgatttgtatgcctatgttaaattatacgtctccctggtcatcctcgaacagatgcccatatatgattcaaacgacttcctgaagtggatgtaaaaaagactttttttgggctttttaaatgtatttttttccatatatacaaaaacataataattgtaaaatatctatagataaattcgatagcacaatttgtctatagatattttttttcatggaaaggaggttgactatgggaccgttgggactgccctgggggacgtttcttatgtttgcatctgctgtaatcggatgtcctctcataactgaattgattctccgctctaaatggtggaagaagaaatcggattactactggtcatttaaccagacagatgatgaggaggaatgaccaaaaagagaacatgacattgtttttggagaggaggatttcatgaaaataggttggcttcagattatcatggccgtcatatatatggggatattaattggcgtcggtctttatatgagccggaaagtaaaatcatcagatgatttctggattgggggaagacaggtagggcctgtggcgacagctctttcttacggggctgcctatgtcagcacggtcgcaatcatcggggacccgcccatgtattataactacggccttggatatgctgcgtttgagattatgataagcgtttttttctgctgtatcctgatctttattgtgtttgcaccgaagatgcgggcgctttcagagagattaaatgtcgtgtccctctcaggtttcctggctatccggtataagtccaaccagttcaggctgctgtgcggaacccttgtgtcggttatgatggtgccgtatgcaatctcagccatgaagggcattgcagatgccatgcatgccattgtggggattccttatgccatgggagtggtggttattgccgtggtatccttctgctacctggtaaccgccggatactggggtgtttccaccacggatatcattcagggaatcaccattgcagtatcctgccttctggtggcggtaatcgtcatcacaaaaagcggcggggtgacagcggctgtgacgtacatgggttcggtatccccctcgcatatacagccgtcttcaggactgacattcgcgcagctgttcagctgggcaggagtttgggcgctgattgcgtttggacagccccagcttgtgacaaagttcatggggctgagggattccagaaccgtgggaaccgtgataagggttgcggttgtatgggaaattatattcatggtttccattgccatgattggcgccgcggcatttaagctttttagggcagtgccctttgacaatgtggacgccattgttcccaccctggtggcagaacataccaatgcagttgtgtcagggatatttctctgcgggatactggccgccggtctttccaccacagtggccctggtactgacatcttccggcgcagtgaccaaggatatttacgaagattattactgcgccaggagcaatgcaaagcaggattccggtaaatccgtcagaatatccaggattgccacgggcatcattcttgtggtggtggtaatcggctccatttatccgcctgattttatctggtcactgtcaaccatgtctgcaggcgttatgggagccgcctttacggctccgctggttttggggctctactggaaaagggcaacaagacagggatgcatggcgggtattatcggagggtctgctgtctctattatctggtattttgcaggacttaccagcgtggtgcattcctttgtcccgggtacggcggtgtcgttcctgcttatggtactggtctccctctgtacgccaaggatggaagaggaacatctggatgtgttctttgagccggggtgcagtaaaaataaaattcaggcggcaattgctgccggcagcaaataatcaatgaagcaaagataagagaggtgcaatattgtgaaaaaactggaaattggaaattttctcgtcagggatattgtctttggagaaaagacagcttatgaaggcgggatcctcactgtgaacagggaggaggcaacaaaggccatcaaccctctggggaagcttaaaaacattgaacttcacatcgtccatcccggagacagtgtgagaatctgccctgtgaagggtgcggtggagccgagattcaggccggacggaagggccctttttcccggatatacgggacctgtcacaagctgcggggaggggacgcttcatgccatgaagggaattgccgtgctggtctgcggccgttacagcagcatgggggacggcatactggacatgagcggtcccggagcagattacagctatcattccaccaccacaaaccttgtgatttttgcggaaaggacgaatgagaaggaactggattatacgctgagagaggaggacgagttccgcatatctgcccattatatggcagagtatctgggaaagacgctggccggcagggaaccggaccggtgggagtgctatgacctggatgaaggctcacagcaggcgcaggaaaagaagcttcccagggtgggttacgtgatgacggtaatcagccagctggcaaagggcatcaatgatttgtttctgggccgggactgcaataatatgatgccgctgctggtccatccccaggaaattctggacggatttctgctgggaggcatggggctggccgggcaggcccttaccacatatgatgcccagaaccatcccatgattaagcggctctgccaggaacatggaaagaccattgattttgcgggggttatcctgtcacctgccgatgtgtcggacagcatgaaactgcgcaatgccatcagcgctacacagatagcggaatgcctgaaattagacggagcctttgtgcaggagtggggcggcggaagcaatgttgatgtggataccttttatctgttaagccatctggaggacaaaggcattaaaaccgtgggaatcatggatgagcatatcgggaaggtgtatacagacccaaaagccgacgcaatcgtgtccgtgggggagacctcaaccatcattgagctaccgcccatggataaggttataggtgacgatgagtccctggtcagggattattactacggcgcctggtccacccatacaaccctggggccgagcctgagaccggaccattccgtcattatcaatacatatgcgctggcatgcggcggcaatccggcggcacagctgaaacgggctgtaaaagaatattaaggagggactagcagtgaaacgaatagtcatgtatataaaccagtttttcggcggcataggaggcgaggacaaggccggctatgagccttccgttgaggagggaccggtgggtccgggaaatgtgattttgtcctgtttaaaggatgcagagataacacacaccatcatatgcggcgataacttcatgaccggccacagagacgaggcaattgaaagaatggatcagtttctggagggaatcgaatttgacctgttcctggccggacccgcgttccagtcagggcgctacggtatgagctgcggtgaaatctgcaaatacataacggaaaaatatcatgtgacagccattaccagcatgaatgaggaaaatccaggcgtggccgcctatgcaaaaacaccggatgtctatatcatgcgcggcagcaaaagcgcggtcagaatgcgtcaggacgcgtcggcaatggcaggattggcagccaaggtgctgtcaggagaagaaatcctttgggctgaggcggaaggctattttccccacggcgtaagggtcagcgtcaagagcgaggaggcgcccgctgacagggcggtaaggatgatgctgtcaaaactacagggccagccttttaagacagagtttcccattgaacaggaggacacggttgttccggcagcccctgtggatgcaggaagagcaaaaatcgcagtcatcaccacgggaagcctggtacctgtaggaaatccggacaggattccttccggttcagcctctgtctggaagcggtatgacatcaggggattggaagcatttaagaaaaatgagttctacagtgtccacggcggcttcagcacaaataacgtaaatgaagatccggaggtactggtaccacttacggcattaaaagaagcggagagggaggggaaaatcggaaagctggatgattactactacgtgacaaccggcaatcttacgattttaaaggaggccaggaaaatgggccgtgaaatcgtggagcagcttaaaatggacggcatccaggcagctatcctggttgccacatgaggaagctgtacgcgttgcggtgcaacgatggttaatgaaatggagaagtccggcataccaacagcacttatcaccaacatgacggctgtggcaaggagcattggaagccccagagttattccgggaatcgcgattaataatccatgcagtgatattgacctgcctatggaggaacagcttaaaatgcgcagaaattatattgacagggcgctgaaggcggtatctgcggaggtttcgggccaggagtttttctaaagcccatccgtaaactcctttaaaaaaggttttccgggcagattcattgaaaaacatcccaggattaagaaaggagcgtcaggcggcgctcttttttttgcgcttgtctttaacgctgatttttggaattggcttttgggcaaagggggcgggaggtcacaggggagggggaaatgtcacagatttccgcttgacgaaatcatgttcccttgctatgataatactaacaagtgttatattgcttgtagaacaaatataactttccttgttacacaaaacgaaagatggtggttttatgttcttgaagattgatttcaacagtgatgaagcaatctatatacagctgcgcaaccagattatcatggggattgccacggacatgatacgggagggggacactctgccctctgtccgtcaaatggctgattatatcggcatcaacatgcatacagttaataaggcatattctgtgcttcgccaggaagggtttgtaaagctggatcggcgcaagggcgctgtagtcagcctggacgtggataagattcaggccattgacgacatgcggggagacctggatgtggtactggcctggggtatctgtaagaatataagccgtgatgaaatccatcatctggtggatgagatttatgataaatacacccgcgggtgtatggggacaaatgacggccaggggaccggggaaggttagaaactgccggaacatgagcggcggctgtccgcctgtatattcagacatgttctgtaataaggccagaaccgtgatgtgcagaaagcacgggtacgtttctggatgtcaatggaggattcgtatgttatgtgaaagatgtaaaatccgggaagccacgatcaaatacactgagataatcaatggcgtaaaaacggaacataacctttgctctcactgtgcgaaggagatggatttcggccagtactccgccctcctggatggggagtttccactggggaagcttctttccggccttctgggtctggaggatgacgaggaggagaccgatgtgaggggaaatgtagtctgccccacctgcggcaccagcttcgaggattttgtggagaacagccggttcggatgcgctgactgttatggcgtatttgatttgtttatcaaagataagatgaagcagcttcagggaagcgagagccataagggcaagcatcccaaatacagaagtacatttgaaaaggagcacccggaggcctcagggggctctggggaggaaacaaaagagaacacagactgtctggcagaggccggttcccaggattcccagaccgctgtggtcagaaagcagattagggagttagactccaagctaaaggaggcagtgcgccaggaggattatgaactggcggccagttaccgggaccagattaaagaactgaaaaaggaggctggaatccatgagtaaatggtttgaggaaatagacagcaaaaactccaacgtgatatacagccgcgtccgtctggccaggaactgggatgaatatgtgtttccctccaggatgaccgctgcccagtgcggcgagatggtggaacgcctcagggagggacttaaaggacttaaggaccaggatggccgggatttaagctacagccagctggaccagatgcaggagctggagaagatggctctcagggagcgcagaatccttaacatggcctgtgtcagcaggaaggagccgtctggactgctgctgtcagctgatgagtcgggcagtattgtcctgggcggagatgatcacatccgcatgcagatactgtcccccggactcaaactggatgagctgtggcataaggcggatgttctggatgattatgtcaatgaacggttttcctatgcttttgacgaaaagtacgggtatcttacctccttccccaccaatgtgggtacaggactgcgtgcctgtgcggtgcttcacctgcccaccctatcccaggtgcgcaagttccagagcattgtggcggatatgagccggttcgggactgctattcgcggcctgtacggagaaggaagcgacaactatggaagcctttatgaggtatccaaccagcggaccctgggacagtccgaaaaggagatcgtggaattggttacaaaggcggcggcccagctcaacaaccaggaaatgcgggtcaggagcgccacccttaatacccagcgcctggagcgggaggatgaggcatataagtcctacggtgtcttaaagtacgccaggaagataacggagaaggatgccaggatattcatttcccagctcatggcaggggaagaggatggactgatgaaatttaatgaggaatgctccctttacagcctgattataggaattaagccggccaacttaaatctttgggccaaacggcctttggataaggatgagctggacgctgtgagggcagcttatataaggcagaacctgcctgagataatctagctcagccatgggcagagccggatttaacacacttgcaaggaggacatgacattatgatggaacgatatacaccgcaggcccaggaagcgcttgggctggcagtgggtgtggcggagacactgaaccatggttacgtgggaacagagcatctgctcattggcctgctgcaggaagggaccggagtggcggccaaggtactggaggaaaacggggtggaggaagaccgcgtcattgaactggttagccagctcattgcccccaacccaacggtacagaccgcggacaggacggcctatacccccagggcccgccgggtaatagagaacagctacagggaggctgtccgttttaaggcagcccagataggaacagagcacattttgattgccatgctgagggaaggggactgcgtggccagccgtcttctcaacaccatcggggtcaatatacagaagctctacatcgacctgctggcagccatgggtgaggacgctcctgctgccaaggatgaccttcagggagccagggccggaaagcggggcaatgccacacctaccctggacagctacagcaggaacctgacccagctggccacagcgggaaaactggaccctgtcataggaagagagcaggagatccagcgcgtgatacagatactgagccgccgcactaagaacaatccgtgtctgattggcgaacccggcgtgggcaaaacagccgtggtagagggactggcccagatgattgcgtccggcaatgtgcctgaaaccatagcagacaaaagggtagtgactttggacctgtccggtatggtggcaggatccaaatacaggggagaattcgaggagcgtattaaaaaagtcatctcggaagtggtggaatccggcgatgtgcttctgtttattgatgaaatacacaccatcatcggagcaggcggggccgagggcgcactggatgcatccaatatattaaaaccgtccctggccagaggtgagattcagctcattggagccactaccatcaatgagtaccgcaagtatatagagaaggattctgccctggaacgccgtttccagccggtaaccgtggatgagcctacagaggatgagtccgtagccatacttaaggggctcagaagccgttatgaggagcatcacaaagtagagataacagaccatgcactggaggcagcggtgaagctgtccagccgttatattaacgacaggttcctgccggataaggctatcgacctcattgacgaggccgcttccaaggtacgtctccagaactacacgaagccagctaagattaaggattacgaggctgagattgatggtctggaggaagccaaggaggaggccatcaagagggaagcctacgagaaggccggagagataaagaagaaacaggaaaagatacgggaaaagatagcccagaccatggaaaagtggcagaaggacaaggagagcaaaaagcttattgtcagcgacaatgaaatcgcggacgtggtgtccggctggaccaggattccggtcaggaagctggctgaggaggaatcagagcgtctgaggaacctggaaggcatcctgcaccagagggtggtgggacaggaggaggcggtaacagccatttcaaaggccatccgcagaggcagggtgggccttaaggaccccaaacgccccattggctccttcctgttcctgggccccacaggcgtgggaaagacggagctgtccaaggcattgtcagaggccatgttcggtacggaaaatgccctgattcgcgtggatatgtccgaatatatggagaagcacagcgtgtccaagatgataggctcaccgccaggatatgtgggatatgacgagggcggtcagctcagcgaaaaagtccgccgcaatccctactgtgtcatcctttttgacgagatagaaaaggcccatccggatgtgttcaacattttgctgcaggttttggacgacggtcatatcacagatgcccagggacgcaagatagactttaagaataccattatcatcatgacttccaatgcaggggcggagaatatcatttcacccaaacgcctgggattcggcatggtaagcgatgccaaggcagattataatttcatgaaggaccgtgttatggatgaggtgaaacgcctctttaagcctgagttcctaaaccgtattgacgagattatcgtgttccatcagctgacaagggagcatataaagggaatcgcggatatcatgctgggcaccatcggcaaacgctgcaaggaacagctgggcatagggcttgaggtaacggacagcgccagagagcacctgattgataagggatatgacgataaatacggggcaaggcctctgaggcgcaccatccagaacctggtggaggaccggatggctgaggagatgctggatggccgcatcaaagccggatccctggtggaagtgggatttgacggggaaaagcttacctttagcgtgaaagcaaagacagccaggccaaaggcggccgccaaaccagccaacaaaccagccgccaaaccagcctcagccggggaaggttctgaggataagagcaaggcggcggggagcaaaagcagggccggacgcgcctccggtaagaagaaggagaccccggcgcccaaggcttaacagcatctgtagcagtttatacaaattaagaatattttcactagttatttctcggtgattgttgtataatttttatgaagaggttatacttaagcacaattagcaggaggataagaagatgccggtcattgaagagttaatctgcatagagcaggatggcaccattagttttggcaattacaagttaggacagaaggctaagaagtccgatttcgaatatcagggagacatgtacaaggtcaagacctacaacgagattaccaaactggagcgcaatgacatgtttgtttatgaatctgtacccggaacagctgcagagcatttcaaggttacggatgaggacgtggaattcgcggtggaaggcagcagggatgcacagattaccatacagcttgagaacgatacggattacgaggtttacgttgacggtgcagccgtaggcagcatgaagactaacatgagcggcaagctcagcgtaagcgtggaactggaagaaggggtatcggttcaggttaaggctgtaaagagagcataaaacttaagtatcatacaggctggaagcgattccagcctttttctgtcagttttttaaatattgattccataaatatgaggaggctatcatggcaaaagcgagaaccaccgcatttttctgtaaggaatgcggatatgaatcatccaaatggatggggcagtgtcctgcctgcaaggcctggaattccatggtggaggaaccggtatcaaaaccgtcaggcagccagggcgggttagggcgcctggcttcggggagccagaaatccccggttccggcagccagaccatctcttctgtcagagattgacatagaggagcaggaccgtatatccactggttttggggaactggaccgggtgctgggagacggaatcgtggccggctccctggtgctggtggggggagacccgggtatcggaaaatccacccttttgcttcaggtatgccggaatctggcgggcgcaggccagcgggttctgtacatatcaggggaggaatccttaaaacagattaagatgagggcaaaccgcatcggtcctgtgaccggagagctgaaattcctgtgtgagacaagcctggagcatattgagagggccattgacactgagaatccccagattgcagtcattgactccatacagaccatgtacagggaggagatatcctctgctcccggaagcgtcagccaggtaagggagtccacaggaatcctgatgcagatagcaaagagccggggaatcgccatttttgtggtggggcatgtgacaaaggaaggcgtggtggcaggccccagggtactggaacatatggtggatacggtactctattttgagggagacaggaatgcgtcctaccgcattctgcgcagtgtgaaaaaccggtttggatctaccaatgagataggtgtatttgagatgcaggaacaggggctggcagaggtggagaatccctctgaatacatgctggacggccggccggaggaagcctcgggcgcagtggtatcctgttcctttgagggcaccaggcccatccttttagaggtacaggccctggtgacggaaacgaatttcggtatgcccaggcggacggcggccggtacggattacaaccgtgtgaacctgctgatggcagtgctggagaagcgctgccgctatgagatgtcgcggctggatgcctatgtgaatatagcgggaggcatgaagatgaacgagccagccctggatctggccattatcatggcccttatgtccagctacaaggaccggcccgtggatccgaaaatgctcatattcggggaggtgggcttgtcaggagaggtcagggccgtatcccaggccagccagcgtgtgaatgaggctgccaagctgggctttaccgcctgtgtgctgccgagcgtatgcgcggataagatgaagcctgtggagggcatacgtttgattggggtgtccaatgtgcgggaggctattggaatcatgtaaaagagcctgggttgggatgggaattgggatgggaagggagagtccgatgtctgtaaagaggagttccctcccggcccgggccattaggacaggaaaaatacttttttgaaaaaacagttgacactttctcaaacctgtggtattctaattgaggttcagaaatgcgccaaacaaaaaggggaatagttcaatggtagagcagcggtctccaaaaccgtagatgggggttcgagcccctcttcccctgctgactattttaacgaatagcccaacccgaagagagtcgaggaatcttattttataaggtttctgggctttttcttttgcataataaagtctggcttatgaattttaacagaatttgaatatgtaaccaagatgtaaccgtttaagtgtataatcgtacatatatgtagtacagaattgtaaattggaggaaatcattcgtgaataagaataaattagtgaaaagaactttggccattgtactatcagcagcaatggtatttacaaatattggccattccccgactgttgcgtatgcagccagcggaaacagtgtggacttcatggtatcaggaacggattttgttgctgctattgaagacatgattcattcaggagcagagccattaaaacaagaggagctggattttaccaatggaaaggcagaaaagtactatcagtttttctttgatggggaggacccggtatatgagttctatccggaatttgatggtcaggatatggaggcagaagtaagggtttttgtccgccttccggaagcagcggatgatacatattcccttactggtgaggaagagattatatttctatatattaacaatagtgaggataccataagctgctcaacaacaatcttaatgtcagatggcagtgaaaagaggacaaaaagggttacagtcaaggactatgaaactgcgtttggtgataacagaattgagtataaatccaatacatctgccacgggccagacagaggctgaaatacctgaatccgatgcagcagaaattgagaaacccggaacagatgcaccgatggtggaaacacctgaaaccagtatggaagagtccggggtgacagaaccagagacaggatctgggattcctgaccaggaaacagaggaaaaggaaaacgaagctgttgagacggatgaagtgatagaagataccgagccggaaatcgttgaaaagtcagagccagagacgcagtctcctgatgtatcggaagagggaaaaacacaggctgatagtcccgtggcttcccgtatcaggcatgcagttcctgtcgtggcggcagtggatacaggagaagaaaattctacgattgaacccagtgttgataagcagcaggaggatacagaaacaggtggaacccatgatgattcagaaaaacatagtaatgataaggacaatgaaactgtaggcagcgtacctaaggaatcctctgcagaggcagagtctgaaacggagtcattgacagaggaaagcgggaagcagacagaagcgtctgccgatgaaaccggagaagaaacagctgcagttgagtcatctgaacctgcaacagatattcagaccccttcagaggaaagccggacagagacatctgaggagactcagacagagacatccgaggagactcagccagtagaatcagaacccgtccaggttacggaaacccaggaaagccagatttcgacagagacggaaagcatcccggtgagttctattggtaatggtgatcttgtggggatggacggatgcagcactgcaaaggcatatgtaacaacactgaagaaattgaaagtattagatgaggtggacggataccgtgtcacatatgagattacccccgaagacaaggcggcaattgtagataagtgtgacagggttaaagcaggagaaagcgttacctttggtgtagaggaacaagagggttttcgtgttgggcaggtagaggcaaatggagatgtggtggaatccgcatacagtgaggaaaacatcgtatggtttactctggagtatgtagaggaagacttggaaatccttataacgatggttccggatggtacatctatgccttttaacaaaacgatctcaatggatgatggtatggatattaccatatccgctttgccgggtgttcttcctgaaaatacggaggttacagccgaaattgtaacatcacaagttgaggaggcaatcaggtctgaccagtcagaagagggacgggaaattatagctgctcctgcttatgatattaacctgtgtctggatggagaaaagctggatgatgaaatctggaacaggaatggtgctgttacggtaagtttttcaggccctcttatggaccaactgattcaggagtcacagatggcccaggttctctgggtaaaggatgagaacaacagcacagaagtaatggaaggcagttataaggatattacccgggagggtacaactgaagatctaagttttgaaaccagtcattttacgacgtttgctgctgtctttgctgtagcgccggatatatctaatgtatttaatattgatgaacatggactgatggatgaggattttcctaaacttgttgtccgggataaagacgaaaatacacttgatattgagattacagaacaggaagatggggccaggagggttaccttgaaagatggaaaacctcttccaaggaacataagcacctggtttgagatttcctacgattttaagaatagttcagaccctttttttgaaacttacagtgtacagaagggagaccattttacatatcagttcccgtcaaatattttatatgacaaaaagcagactgttgtaaaagatatcaatggaggagaagctgtcattggaacggcatccatcaatgcagagggttacatggatgttgaaataacagctgaaaatgtaggccagaattatcgcggcacggcagaagccggtggtaaactggatttggaaaaggttttagaggaaaaaaatgaaatcactctggtgggtgacgaagtggagtacattatggaactggtgccggctccggtgcaggaaaattactctgtaaaagtagtcaaaggacccaagagcggaaagtggacagaccaggatatcaggtatgatgagaataggcttccttcagctttgcagtaccatgtaaccgtgacagctgatgcgcagaacagcggcccaataaccaatgtaaaagtaagcgataccttggggaacaccaaaaacggaacgattgtatttgacaagacccaggaaatcaaatttgaatccaataatcaggatactgttatagacaatgttactttcggcggcatgagcaatgggggaaagaccataggtatccaactgaatacaaaggatggaatgccggcctctatgatgcctggagagtctgttagtttatcttattgggtaaagcttggagccggtgcttggagcggtcagaataccgggaattcttcaaaagagatgtccgcatccctgtttttggaacttaagaatacagttaatgtgacagcggataaaaaagtatcgggcagtgacagcactacatttaagaggaccatagaatgcgttaccaagagtggaattgtacattataattatgagatagatggtaagactgagccggttgtcattgagtatcatgtttttgtaaatcccaggctgattaatatgaccggatggacgattgaggataagctggataaaaatcaaaagtatctgggaaatgtagaagttattgcttatactggcaaaaatggaacctcacttgggaaagtggatgacattgaaccaataatttctaagaatccccaaacatggaaatatgtcattgaaaatccaggaaaatattactatgatttcaaatactttaccactcctaatgaagcaacagaaagcaatctcagtaacgaaataaagataacatggccaggcggaggttctggaggcataggcggaagtaccggtgtcggattcctgtacaacacctataccatgacaaagaagaacttaagcagcaacatgaaatccagcaataacattaattccggcggggtatatgagcctgtcaataatacagccggaaatgttgggtggggggatgaatttggcacaatccgctggcagagcgtgcttaccccatatgcagacgggcagacgaaaggcgccacgattccagcgggcactgtctataaagattctctcagcgtaattaagtggggaaataaaaataaggaagatgctgcccgtgcaaatatgcatacattcaaggatgatggcagctttaaggcttcctttgttctgaaagacggtaatggcagggctatatctccggatgatgggacctatacattatcatttgatgaaaaacttggaaaccgtggattcagcgtagtgttttcaaaagatgtcccaggaccggttgtcattgagtatgagtccttcgtggatttagagatgttggaaaatgtgggggtttttgataaagacggaacaaaagataatctgcggttcaaaaatgtaggtgagatgacaatcaatgggacaacatggaagagcgctacctctcagccatattacatcgaagattatatttcaaagaactgggtaaaaaatgatacgaaagcaggcaccatcacatggaatctgaatatcaacaagggatatgggaatgatgcaccccaaaatctggggcgtttcacggttgatgttattgagtatataccggaaggactaactctggaccatattaaattccagagcgtgaactatacgctgaaaccagaaaagggagattacgatatagatggaaataaagtgaccatccaccttaacacggttgctagaaacttttctggttacaagatgagcaaacatattaacctaaacatcataaccaaggttacagatccatctataaagagttttacaaacagcgcccagatggttattgatggaaatatgcttcataaagtatcagctacgactggttttgataagagcttcctgaaaaaaggaatggcatacagccgcgacacggcgccgtatgctgaatatacaattctggtcaaccagccaggggcagatatcagcaatggtaccctgaccgtaattgataccttaggagtacccgggaaaatggcatatgttccggacagctttaaggtaacaaatgcagaaaacgggacacctatagaagaagcgaatatcagggtgggaaaagacagttttggcaatgacagttttgagatttccaatcttccgaacaaaacgcccattaagattttttataaggtaatgattacaggagctataaatgaaaccgttgatacgaagaacacagcatccctgctctacagcagagaaggtataattaccgaaaccattgagcgcagcgtcactattgtaaaagccgcctttacaggaggaggaaaattttctataaaactatacaaggtggatcagaataaacagccgctgacaggagctgcctttacgctgagcaaagtatcagaagtgggaagcccggatttagaatatgtgggagagtttaccccggtaattgattctgggaatccgcaggcaggcgcagcagtgctgataacgggactggagaaggggcagctgtattatctggaggagactacggtgccggaaggatatcagaaggcagaaggggagtattttatcattccggatagggagaatggtattggggtgccggatggagcgatagccatagaaaatgccggaacacctcatgtagtagagaacattaagaattccggtacattaaagctgaccaaagatgtaaacggcagggaatcaggcagtgattttgagaccgatttctactttacagtctatggtggagaccgatactacgatagggatggatcctacgccgacctgaggactgtaaaacttcactatgattccaggattgcggataacagcctcatactgtcgctgcctattggagaatatgtggtgaaagaagtggcagacgcagaggggacgcctattaacggtgataatttctattataatgtacagataaatggtgaggacaggaatgaagcggtcatagctattgaaaaagaacagcaggcggaatgtctggtaaagaatctatatgaagcagatggaaatctccaattcactgccatgaagacaatggaaggaaggcctttggaagaaggggaatttactttccgcatatacgagggagacacgctgaaagcggaagctcaaaatggactaaacggagttatcctgtttccggagattaactacaaagccaatgatgcgggcagacatacctacacaatcatggaacagaagggtacattgacaggtgttgactatgatgatactgtttatactgtgacggtagaggttacggacaatcatgacagaacagtgagtgcagaaatagtaaatatccagaggtctgatggtgctgaggcagaggtgatacagtttaataatgtttaccatgagaatccagaaaccacaccggatccgtctccaaatccaaacccatctccttctccgggagggagtactggaggaggcggcggtacttccaatactgggggtggacggtaccagccttctgatggcggaccaggagttacaatcagtattaccccggaagaggttcctatggctcagattcccagccaaccagactctctgattacgattttggatgacgatgtaccgctggcaccactgccaaagacaggtgatatgtcagttgatcattatatgctgactgtgatatcaatgttactgacagggatttatctagcgttgacgaaaagaaaaaaggaatgattattcagtaatattattttaagcattatgttagcatcatagagcagatgctctgatgtttgaaagggcagccgcttcacaagtgaaaaattgtgaagcggctgcctctttttttattttctcttcaagaccaatactgatgcggtgcagataatgggcgtcatctgtatccggtgaatcttccctgtagtggctgccgcagctttcttttctttgcttcctgatatgcctgcggtgttcagggtgtgcagatacagattttccataccgccgctggtcgggatgacggcctttacagacaaggtaaggagctgtaccagtcatggcacagctgaccgctggcccggtatggtcagcgcttgaaatatcctacattgaaatggaactgcatggcgtcataaaaatcagaataactgccggctttcaatgcatggcagatacgctggtgtttttcaacggtaagttccatgttgctgtgggtagtctttactttatagtaccggtcacaggcccagaaaaactctataatggactttagcagccggttatccacatcctggaacaggattttatggaaggcggcgtcggtttcggcaaatttcacgccgtatacggaggagtgggaacgtttaatctgattaaacagttcctccatggtaaccaccttttctgacagaagcgcaatgcccttttctgtcatgcggtcaaatgcatcttttgcgaatcccagttccaggacgcgcctcagttcctcaatctccttgtggagctggtcctcatcactgatactgtatatgagattgctcaggaaaaaatccgtattaaattcctgaatcacgatacccacgccgggagtggagtggaccgccccggttatctccagtgatttaatagcttcccggagcacattacggctgactcccagcatctcgcacatcttcatctccgatggaagcttgtcacctggcaacaggtgatttttttctatgtagcttttgatttcgtcgtaaacctgtaaatacagacgccgggacttgaggtttttcataccggtagattctgccatgtctgatattctcccttaatatgtaattgttaaaataataatttataggactatcatatttcatcatgaaagaaaagtcaatacgatatacatatacaacaaaaatatatggaacaaattatgtattatacacatatatacaatctaaacattttaatatattgacatatatgtcagattaacgtacaataaggctgtattgattaataaatacagcaacatgccacatactttgtagtacaaagtacaaatataaaagaaatggaggttacgtagtatgagaaaaagaagattggcgagcctgttgttggcggcatcccttgcagccagcgcattggccggatgtggttcgggaggaaagacggaaaccactgcggcagcggcaggaggacagactgaagcggcaggcgggacagcaggggagaccggggcggcaggcgggaccagcgcggctgaccttgggacaccattggcggatgtcagggtaaggcaggcccttgcctatgccattgacatgaatgccattgtggacagtttgtttgagggtaaggcagaggtggctaagagctttactgctcccggtgactggctgaatgccggcatcccggtatatgagtataatccggaaaaggcaaaggagctgctaaaggaagctggatggccttccgattataccctggatgtggtttactattatgatgaccagcagaccgtggaccttatgaccatcattggccagtactggcaggaggtgggcgtgaaggcacagttcaggaagctggaaggcgatctggcggcccagctgtgggtaccgccggcagatatggagaaggggccttcagcagtgaagtgggatttagcctatgcggcagtggcagcccttgccgagagcgagttctataatcgttttgcatctaccgcatccaataactcttctgttcccaaacaggaagggctggatgagatgattgcagcttccaacgccaccatggatgtgggtgagcagaaggaggcattttacaaaatccagcagttcgtggctgagaatgagctggccatgcctctgtaccatcaggtatgtttcatctataccagcgataaactggatacagcaggcagcgcctttggcaatgaccagttctcctacgaaaagaacatactggactggaagattgacagggatgaccgcaccatgtacaccaacggaggacctcaggaattcttctggtatcccatggtcaatcccgggtatatgattaatactgaacttgtttttgataagcttatcaatgcagacagttcattaaatccaacagatggcatgctggctgaaagctacaaggtttctgaggatgacaagtcgattgagtttgttctcagggacggccttaagtggcatgacgatgaacctctgactgctgaggacgttaagttcacactggaacttatgttaaggactccgggtaccaatgcagtggcatcagaagtcatgaaggcgatccagggcgcccaggatttcctggacggcaagaccgataacctggaaggtgttgtcattgacggcagcaagattacagtgaactttgacacggtttcagccaatgcgctggctgtattctcacaatggccaatccttccaaagcattgtctggagaatgcaagtcctgaaacccttcagcaggatcagttctggcagaaacccattggttccgggccatttaaggtggatgaggtggttctcaacaactatgcgaccctgaaacgctgggatggatattataagacaggaaccggtaacatcgagacaatttacatgtttgccagcggtgagaatgacagcaatctggttaagaacgcaggtgcaggtaagattgattatgcatggagcaaatccacggatgacgccaaggcaatcgaatccatggatggaatgaaggtttcaactgccaatatcagatacaccaggtgcttctacatcaatcagttccctcatgaaccaaatattaagtaggatgattggactgcggcgggccggctatatgacggtccgccctgtttcttagaggagatttcgacgaggaggatttgaattgagtaattatataatacgtaaaatcctgacacttatcccaatgatgctggttatcagcttcctgatatatctggggatggagctgatgccgggcgacgcagtggacttcctgattcctccggacgccctttcaaccatgtcgccggaacagctgaatgccatgagggatgccctgggtttaaatgatccgttttttctgcgctaccttaaatggctggcaggacttgtgcggggggactttggctacagccttcagagcggcgtgccggtgctgaccctgatgaagaaccacctgcctgcaaccatagagctgaccctgacttccctggtgatgtcttccatattcggtattctcctgggggtcgtatgcgcccttaagaagggaactgccctggatcagatactgagcgttgtgggtatggtgggagttgccatcccccagttccttctgggactgatctgcatcaacgcgtttgctctgcataccagcattcttcctgtaggcgggaggatggcttatgcgggccagaattttatccagcggcttccataccttatcatgccggccacagtactgggattttccctgacttccggtgtgatgcgttacgggcgttccagcatgctggattccatgggacgggattacatgaaaacggccaggagcaagggactgccggagtggcgtgtgaacctgctgcacggcctcagggccgccatgacgccggtggtagtgctcattggattccgtctgcccatgctcatcggcggcgccgtggtggtggaggaggtattccagtggccgggaatcggcgtattgtttgtggatgcggttcgttcccagaatacgcccttggtaatgattattggttttttcagcgttctgttggtattggtggccagtattgtggtggatatcattaccgcgctgctggatccgcgtattaaactgagttaggaggtgcgggatgaaacattcacttgacaggaaaatggaccggattctggaacgggagaactccggcaggataaaaaagggaatcaggaaccgcgcgctcaggaagctgtttgccaaccggctgtcagtgctgggatttatcatatttatcgtgatacttgtcatgtgcctgggtgcgcctttgtttacacagtacagcgccaccaaggtggacctgcgcaatatattaagcccgcccacgtcttcccacatatttgggaccgacaagataggaagggatatatgggccagaatcctctacggaggccgtatttccatcggcgtggggctgggaagcgcacttgtggctacggtcctgggggtgtcgctggggactatggcaggttataagggcggctggtttgacgggatcatcatgaaggtttccgaaatactgatgtcatttccccagattatattggttctgattcttgtgaccattacgggccagagcctgtggaatctgatattcattttttccatcacaggatggccttccatgtaccgtatggccaggtcccagatgctgtcgctgagggaggaggagtatgtacaggctctaaaggcttttggtatcggaagcatgaggattgcctttgtacatatgcttcccaatgccataggacctattttcgtaaatatcacattgtctacggccatgtttatcctgcaggaggcatccttaagctttttggggcttggggttccgttagaggtggcaacctggggcaatatcctgaatgcggcccaggacctgatgatacttaagaactcctggtgggtatggctgcctgccggtatcgtggtgacactgtttgtggtgggaatcaactttatcggtgacggcctgagggatgccacggacccgtcacagattggttaacagccatggagagaaggagcgtgatattacagtatgaatgataacattgtattaagtgtccgggacctggaagtgaatttctataacaatgagagatgcaacagggtcttaagaggggtatcctttcagctgcaaaaagggaaaattatgtgcattgtgggagagagcggatgcggcaagtcagttactgccaattccatcatggggctgctgcctgacctttcaagaattgagaaaggggagatacatttcttccacaacggcagggatatacggatagaccagttgaaacgcaagggaaaagagatgcgccagattaggggagacgggatttccatgatattccaggaccccatgacggcccttaatcccgtatttaccgtagggtatcagattaacgagtcccttttgtaccatgacagggcaaaaactaaaagcgaggcaaaacagaaggccatacgtctgttaaaggatatgggaatacctctcccggaaaaacgggttgacgaatatccataccagttttcagggggcatgtgtcagcgggccatgatcgccatggccatgagctgccagcccaaggtgctgattgcggatgaacccaccacggcgctggacgtcaccatacaggcacagatatttgaactgatgcaggaccttaagaataataatgacgcggcaatcctccttattacccatgacatgggcgtggtggcggaactggctgataacgtggctgtcatgtatatgggcaatatcgtggagagcggagatgccagggctgttctgacccgctccgcacatccatataccagggcgctgcttaaatccataccagtgctgggaagggggaaaaagcaggagctggaacctataaagggttccacaccagacccatatgaccgtccaaagggatgtcagtttgcgcccagatgcgggtatgcaacggagcagtgcatgcaggaaatgccgccggagacggaaatcgggccggggcatttttgcagatgtttccataatctgatggggaaggagggacagccggatgccggaaactaaggatgtgttgattaaagtcaggaaccttaagacgtattatcctgtaaagcagggggtgtttaaacatacggttggacatgtgaaggccgtggatgatgtgagcctggatgtatacaggggagaaatcctgggcgtggtaggtgagagcggctgcggcaagaccacattgggaaagagcatcctccagctcataaagcctacggagggaagtatacgctatgcctttgagggcggggaaaaggaactgattggcatgaataaaaaggagctggatgaggccaggtgcaagatgcagattgtgttccaggatccctactcctccctgaacccctcctttaccatattcgggtccatgcaggaaccattaatccgttttggtgaaaaaagcaggaaagcccggcgggagaagatagcaaagctgttagaggccgtaaacctgcctgcggattacatggaacgctatcccaatgagttctcaggcggccagaggcagaggattgggattgccagggccctgtccgtatcgccggagttcatagtctgcgatgaagctgtgtccgctctggatgtatccattcaggcccaggtgctgcagctgctgaaaaaactgcaggaagagcgggggcttacctatatgttcattacccacgacctgtctgtggtggagtatatcagcgaccgcattgtggttatgtatctggggcgcatggtggagatggcggatacgcaggaactgtttgagaatacgctccacccatataccagagctttattaagcgctatccccattgcggatatcgacagaaggagaaagaggataccgttacagggagatgtacccagtccggtgaacccgccttccggctgtccttttcatccccgatgcccggagtgcatggaaagatgtaagaccgaagtcccgcatccggtgatcatcaccagggatgggcgggaacatatggtgtgctgccatcgggtacaggcaaatgcaggcggcgggaatgattttaagacacatatataatcgaagaggagagagaaatgagcagatttgagatgaatcagatcaagggggtcatccctgcaatgatgacgttctttgacagggaagagaacgtggatactgagtgtaccagacgcatggtggaattcatgctggagcatggcgctgacggtttctatcttacaggcagcaccggcgagtgctttaccatgaccgtggaggagcggaatctggtggtggatacggtcattgaccaggtgaagggccgtgtgccggttgttgtacatgttggggatatcggcacgaagaaatccatagagcttgcggagcatgcctacagggccggcgccgacgccatatcttccgtaccgccgttttactggaaattccgtgccggtgatatctataattattacagggatatatcggagtccacccctcttccaatggtggtctataatattcagctggcaggacttatggatatggacctgcttttgcagctggcaggacttcccaatgtccatgggcttaagtatacggccaggtcccacgatgaaatgggattcatcaaggaaacactgggcccggatttcatgatatattcagggtgtgatgagatggctttttccggtatgtgttcaggcgcggacggaatcatagggtccttctataatttgttcccggatttatataagcagatccttaagaaggtggaggaaagcgatattaagggaggcatgcggctgcagcggattgcggacgaggtgatatttgctgcgctgaagtatgatttcccgtccgtacttcacaatctgatgaattggcgcggtttggaatccggatactccaggagaccgttctacaattaccaggattcagagctggagggccttaaggaagatatcagaaggataaaggacagataccaggcagaagagctggatatgttcaggctgtaaggagggacggtaagaatgagtgggagtaagccgcagtacagcgtattggaacgtaacagaggcgttctggccgcggtggccgggacagccataaccaggcccggagagataacgaagcggtttgtggctgccatgaaacagtaaaaagtcagcagaaagaaaaaacggattccatgatacagaaatgcacccatggctgagaaaattgattttcccggctgtgggtgctttttaggcactggatctggtctaatccatattattcataaaatcataggtgctgttcctgtaataataccgcacaaacagaaagctgagaagtgttaccaatgtagtaagtataccgccttcgataccgaatccgcccccgtttagtatattgtcccgggtaaagtgtgtggttatgataccgggaatgctaaggccgctaacaggcattccgtagataattccctgaaatacattccatgtaaaatgataaccaatacacatccatatattgccggatttaataaacatatatgaaaaaagaatgccgacaattattatattgaagacggaaagaagcgtcacgctggggtttcccagatgtatggccccgaagatgactgagggaaggaagatgaggacaaaaacatggttacggcatctgcggagtacagccatgatgaacccgcggttcagcagctcctctgcataggctaccaatataaaggcgaataaccacgttaaagttaaagcagtaatgcggggctgccaggatgcaactttgccgcctccaaaccacaccaccaatagaaaaaccagcgtacaatttaccatacccagaatcatccctgcgccgcactcttttttgtggatttgaacggatgaaggcccatttcgctcaaaggacgttttataaaacatttccacgctatgattggaataatgatcatcatgacatctgtcaggatcagcatcgccaccggcaggcaggcgtcgttgacccagttggcaagaggtgaaaaatagtcagccgcccgattgagatcacctgtggctgttaatattacaatcagggcagtcaggaccagaaaagatgcaaaatacagcagtgcgtaataaagcagcatcacaatgagaatggtccatccggagcgtaaaaatccatttttgtttttgaatattgttttgaatattgaattgttccatgagtgcataggctgttatcctttcggtcatatgttaatgaggttcatattacgtgtttgctttgtaaaggattgaaagaattcgtttcaggtatttgtttttattatggctgaaccatatcatggtaattccctgtttgtaatggtagctgtccggcagtttgtagctcataatatttttattatttgccagattgacataaggacgaagcagcgtgacatagagtccggtggccagataaattggtatgtcatcatatgattttacgatttcaataccctttggagtaaatggaagcagattaatcattcgatagtcatttttttcaatcagatattttgtggtgacaatgggataatttgcaaaatcatttatggttaggccgcttttattcagtgggctgttgactgagaagaaaatctgcggttctgttgaggtgatggtgtggagtttaatatttggatttgatatatttgtatcagataaaataaatcccaggtcaatggagccgtccaggactccgttgacaacatctgaattttcacagcattgcaatttaatgaccgcggtcggaatataattctctcttctgaataaggagaaaaattcaggtatggatgaagagaagtcaatgctctggcaaaatccgatactgacccgttcctgtttggactggcgggtgttattaagcagcaaatctatcttatcgtatatctctgtcagctcaaggtcaagcagaattgctctctgggtcggcatgattcccttcttttgccgcgtaaataagggttcccccatgattttttccagtgtcgctatgtttttgctgatggttgactgggtggtataagccagctttgcagcctgggaaaaactggaacatttcatggcaattttaaaatactgtatttgctgcagactgatgttattcatgattgccggttcctccttgcaattgagatacagctgatgtgaccattctaccaaaagtcatgtgtgttggctattggaaaagttcataaaaatcatgtgaaaaatgaatgatatatattcggccttggaataaataaactgcattttttgtattataatgtatgtaaatcagatctgatgtatttttatgtattccaataaaacagacttgcaggaggttatgttgcatatgaaaatagtgagcgtagatatatttcttttggatggcggttcgcccgggtggaggcccattgtctgccgggttaatacggatgaaggggtgtccggttacggcgaggcatcagtcgggtttgataccggggcgtctgcctcgtatagtatgattaaggaagtggctccgtttgtgataggtatggacccaatggctacagaggctgtatggaataagatgtatacacagaccttttgggcgcaggggggaggaaccatcatgttttccgccataagtgccattgatatggcatgctgggatatcaaagcgaaagcgctgaatcttccgctctataaactgttaggtggcaagtgccgtgagaaattacgctcatatgcaagccagctgcagtttggatggggaaaaggaatggtattcgaccgtggatataaaatagaggatttggttgagcattccttaaaagcagttgctgaggggtttgacgccatcaaaataaatttcattacatacgatggaaacgggaaccgtcttggatttttaaaggggcctatcatgcccggaacaagagctctgatagaagagcgggttaaagcggttcgggaggcagtaggggatggcgtggatatcattgttgaaaatcatgcaagaacagacgcggtgtctgctgttgaaatgagtcaaatcataaaaccttacggtatcatgtttatggaagagacctgtacccctatgaatctgcaggtgcttgaaacagtccgtaaccactccgctgttttgcaggcaggcggagagagggtttatggtaaataccattatgccaatctgataaaaaaggatatatttcaggtatatcagcctgatttggggacatgcggagggataacagaagcaatgaaaatcgcttccatggcagatgcggttgacgccggcatacagattcatgtatgcgccagccctattgcgatagctgcgtcgctgcatgtggaagcgtcacttcccaattttgttattcatgaacatcatgttacaaatagaagtgaaaataatatacgcttaggtgtttacgattatcagccggatggctgcggtttctgccatgtgcctgaattgcccggaattggtcaggagttatcccggtgggccatggaccacgcattacaaaaggagacagtgaaaggggaataaataatatgggtgaaagcgaaaatggacttaaaagacaaatcggattgtttggagctgttgcaattctggtgggcgctgtaatcggttccggtatcttcatgacgccggggaccgtcgctgcatctgcaaaatcattcgggccgtttatggttgcgtggatactcgcaggagccagcggaattctctgttcattggtatatgcggaattgtctccggccatgcccaaggcaggagggccctatgtttatataacagaagcttttggaaatggttttggctttgtttacggttggtccatgactatcggaaattacattcctttggttgccatgcttgcaactggatttgcaagcaatctggcaaagctgataccgggaattactcctgtaggaattaaaatggtggcatcagctgttattattgcacttatgatattaaatattcgagggacaaaattagggtcaacaattgcgaatatttttacagttggaaaacttttggccctgcttcttgttatcataggcggctttttcattatatcacctgaaaatttcacatccgtgacaactagctcacaggtagcagaatggaatggagtcctgagcgctgcgtttccggcgttcctggcatttggaggttattaccagctggcatatatgagtgcggatattaaagaccctaaaaaaacactgcccaaggcaatgattatcgggatgataattgtaatcgctgttaatatactgatttcagttgtttgtgtgggcaccgttggatttgcacaacttgccggaagtgagactcctgttattgatgcgggcactgcgattttcggaccggtgggaactataattgtcgcaatcggcgccagtgtttcgattttcggagccctgaacggcggtatcatgagttatccccgggtatcatattccatgagccagaatggtttgatgtttaagtcatttggcagactccataacagatataatacaccttatattccgacattgtttatttgcctgactgcattgatatttgtctggaccggttccttcggcactttgctgggcattaatgtatttgcaggcagaattctggaatgtattgtttgtttatcactcctggtattgagaaagaaaaagccgaatatgtctcggcctcttaaaatgcctggatatccagttaccaccattcttgcgattgcagtcacatttattatctgtatgacatgttccgggattcagatgattaagagcataggactgatggcaacttccattccggcgtattttatcttcaggaccttggataaaaagaaggattaaaggtttttgttttggctcacagaatgcagggctggtgcaggacggctggataatcagctgttctgtccggctctgtttttgcattgttaagattaaaacaattcagtcatagctttattaacttcattttggtataatgtaaaaggggtagggagacagcccgcacgctgataaaatgttaagaagcaatgccagaggagacttatatgaccggacaaattgcagatgtttatgaatacaacggaaacagatataatatagtggcaattaagggaacgatgaattttgatattcatgagttggggtttgatcccgtacccattcatacggcatgttggagaggttatcattgcatttataatataactgaggaaggcctgtttctaaaagatttgtttgtaaacgatagaaacggcagctatccgcctgttaatggagtggaaccagaggaggacaggtttgacggtaaggtatattatggtatcaacattccggtgaaatttgatggcggtattatcattgggaatgattttctgacacgatattatatccatatgggattccagcgggtttatgcatataagacagtatatgagctgatttttaaagagggccttataacaaaaaagacagacctttcaaaaagggcagctttaataagaacagaaattgacgagaagggcattgacagggccaatatttctaagttcgtagaagagagtttttcgttggattacgaagataaatggactgtttattgataatgatgacaggaaaacgctgtttgaattaaaaggaaaagaaagtggggaggcaatgagtcatacaaaagagtacaggggcgaaaagatagaagccggccttaccgcgcgtttgattccgcccggcgcacagtattcggacagcttctgcagacttatattgactgagcgtcacttatatatactggaggataattataatggcacttataatgagctgtacgcttttttcattgaacggatacaggatatggaggcgcaggttaaaggattaaggtataaaaagtcagtgctgggagaaatgttttccaatggtattttgtcgttgtttggaggggttctctatgcttccgagaaaaagaaagaagacaatgggattcgttttgtcattacatatgatgacggtatgggaaaatgtaatcagttgtattttaaagatttgcagacaaattcaaatcatatggtaaaggtgtaccatacgttgaagaaatcctttgataagaccattatgaggtgaggtggcggatgatggatggacatatatggtttgttggctggtatgatggaggggattaccatgagataaaaatcactcaaaaagaagtggataattgcggcacggccgggtgcggtctgaattccattttatattatatcggcggtaaatatggggacgaagctttatacaatatgatatatctgcagtccattgaaccgtttgggaccaatggtatttttcggatgtgtgtgacggaccccattaaagttcatcctgaatttcaaaatggaggaatatatttagttgattgtaatagaacattgatttgcagaaacggggacgaattgtatatggaactggtaaaggagaagggtgatatctcatgatgcccccttctttttttgctcttgataactgccgcggatgtatgtctatggcctgcaggccatagctatgatgcctccaatgagaggcctggcattcttatatttatcactgcgggaggggctgagccttgatataaaggccggaaagcgcggtatgaaattagactataaaattaaagcagaatatggtaatatatagataactgcttttaaggagatgttatgagaaagggattctggaagcaattatcatacgaagataaatttgatagaaaatacgcgtgctgggcagtgaatcataacggatggagaaagtgcaagcgtttaaacaggagagctgccagacgtgcgctgaaacgattgaatgaggaaaactatccaacgtaatgtggcatggcgggaagtggtttttagtgatgggaagggagtgacaggagatggcagatataaaatatgatattataaaagaaattggcgtgttatccgaaaatgcaaaaggatggcggaaggagctgaacctgattagctggaacggaggcgcagcgaaatacgatatccgtgattgggcgccggaccatgagaagatggggaaagggactactctgacagaggaggaaatggagaatctgaaagagatactgggactgatagaaacggtaacagaagcgtttgtctgacaggaatcagtaaggaggaaagccatgctggaaagatggaaaaaacagttgttttcagaggacgggatgaaagtagtcaatgttttgtttattcttttgtatctggtcagaaatcccctttttaccatatgcgcctatactgtatggtttgtatatttggtatattctgtcaggcatacaaagagtaagggcatgaagatattttattctgtattaagtatgcttgcaatggcaaccgtactgctcaatgcttattttaccatcttatagccaggagctatgagaaaagaaataagagaactggtgaaaaaaacgaatgcctgaaaggaatattttgtgaaaacatataaaatttaccaagtggattcatttaccagagacaggtttcatggtaatccggccggggttgttcctgatgcaaaggggcttaccgatgagcagatgctgaggattgcaagagaattaaataattcggaaacagcttttatgtttgaaacagattctccggattataatatagaagtacgtttttttacacccacaacagaagttcccatatgcggccatgccacaatagcggcccattatgtcagggccaaagagagaaatatggaaggcggaacggtcgttcaaaaaacaaaagcaggaatactgcccgtagaggttgtccgcaccctaagtgactactcaatcacaatgacccagggaacgcctgcggtgtctgcgccctttggggatgctgtaagagaacggattgcggacgctctgggaattgctcatgaggagctatgcagggaatatcccgttgctgttgcttccaccgggcattccaaggttatggttcccctttattcaaatgagctgcttcatggactgcggccggatttgcagaagctgacaaagattagtaagcaaattgaatgtaacggatactatgtctttacactcaatccgcagaataaaattttggtccatggaaggatgtttgctccggctatcggaattgcggaagaccctgtaacaggaaacgcaaacggtcccctgggcgcatatctggtgcattttaatattttacaggaggaagatgccccatgctttgactttgatattttacagggagaagcgattaaacgcgatggaacaatgcacgttcatgttgaaaaagagcacggagcgccgaagctggttcaaattacagggaatgctgtcattgctttttcaacggagattactatttgagcatatgatgaagagctgaatttccttttatttggtagattcagctctgttttattgggactatgcgcatagggcattttttgccatggcatttatgacttctgtgtatctgtattttccggtgggcagcacagcgcctggtgtgctgcgatggtggctaacgtatcccccaattgcatgaatatggaactgataagggcaatttcttccgggctcttaccttctgcaatgcagcaggcgagcgtggatacagaaagggcaagttcgcaggattgcaagacaaatcacctccttgtagtcatttgataggccggcatccgaaaggagaattccggtatgcctgttgcatagggagcaatctcatattgctgataatatatgacaatatatccgggccgcagaaagaaatgattttgattgaacttatttctcagaagataggggtaatcttcaaaataagaaccaggggattcctttaagcgttctgcgatttgccgttccacagacgtttggagtccgttcagggctgcgggagtaagggcggagatatcgtccagatgtaactgtttgccggtactgaaatcccatgtgtctgaaatccgttccagttcctgatgggcgcctcccatgtaagtgtaggtatccatataaagacttgtaatacagccggaattataggttatctgataattcatatccagggtatagcggttgaagggcggatgattggatgtaatatatctggcactttcaaccgcctgagggtagaggacggtacggcaatactgttctgtattctctgcaagctgcatataatagatgtttgctgtttgggcagctgataaaacacaggtggttgagaaggatggataggcaatatgataggtaaataccggtatgttcccataaagcatggtgtcgttcaggattttttctgtgattgtctgcacattgatttccgatttaagtagtttgtaatagtatattcatatagattcctgacatgacagtgttaaatggaaagcacagtatgcgcatcggaatggtcgttttgcataaacaagggccatgtgggcaataaaatctatagtggctttacagactgaattttggtataatatagtaagtttattataaaaatcttatgctctataaaaatatgtgagtttggaaacgtaatggaggtagtacgattgtctacaaattattatatttttaaccggaaaaaacgggaagaaatccaggaatttaacaggttttgggaagaaatatttattccaggaataaaacagcagatagaagatcattgcagtaagcagaatggagcttatgtcaacacggattttggaaatgaaataatcggagaaaaaatatccgggatttcgggcgcgccaggtaaatccgagagctatgaaaccgttataggtgtgtctcactggaatggaaagcggaacctgttccaatgggaaggttcctatgttgaggaacatatcatccgtgatgagtccagtctggtggagttttttaacagtaagatgaatcagcagcaatacagtatcgtggatgaatttgacaaagagtatacacttgaggcgttcttaaatgccataaaatatggaggggatgaatcagtttcctgatgatataaatcatatgttttgcatttatgcggatacgtgaaaggcgggtccgcattttatcatttcaggcacggaaaccaggcaggaaatttgattggtgaaataatacgcagaaacaaatatcagaaaacaaatgttcggattctgtttgacaatatcagctgtgtttggtatactttgtgtatcgaacaaatgtttggaggcgcgtgatgtcaataagcagaaactatgcagtcagatgtcctgaatgtggttgtatcataccatttgaattatatgacagtattacatcatccttggatccggggcttaggcagcagattctggacggtcagtttgaaacagtagtatgccctgattgcagggctgtgtcatacatacagtatgatattttatatcacgatcctgccagaaggtttatggtatgtgtgggaacggattattcggatgtgtttcagcagtctgattgtccgaaagattacaagctgagatatgtggatgattataagcagctggccgagaagatacggatttttgaggcagggctgaatgatagaattatggaaataacaaaggagtccatgcgccatatggcaaagagaaacctggagttatactatgcaggcagcaggagaaagcttatgtactttattgttccgggacatgagcggtatgtagctgtatcacagggcctgtataccttggccggaaaatattatgataagattcctgtagagaaagaatttggattcctgcggattaaccggaagtatgcggaggcattgaaaacagtagcggtatgatgatataatcagagtatcaggacaatttgaaaaggagggtatgtgatggaacgtaaagtgataaagatttttggggcccaggacaatatacaggcagagatgattctggagacattgggcaacaatcagataccggcttacaagaagggtgtgggttccagcgatatcatgaatatatatggaggcaattccctgtacggagaggatatatatgttgcggaagaggatgcgcagaaggcaatggaagtattggaggggatggggctgacggaggaacgctgaacatggtgactgatactatccatctattgccagaaacatagatttgtgatagaatccttatgggataaaatcacgatatgcactgcagcaggcagggcggaatggagaaaacgaatgaaagcatttgattgcgttaacaagcaggaagttgaagttactaaggaaggtttgattgacttcatgaaaaaggaccgccagattgatatgaagtttgcggagaagagaacagacgatatgggatatctgacctgggatgccgagaactggacatgcgtggacggacagaacaagttcatgcgttgttattcgctggagggccgtgtgctgagggattccaccagccataatatttatgatatggaaaatgactttttcccggagcaggccatggagattcagattaactaagtatcaaaaaaagacagttcggctgtcttttttttatggctctttgtcaatagttggggtgggatttgttaaaatcccgccccaattctatgaaaagggcccttttta

SEQ ID NO: 3177 - DNA, 53137 bp, Unknown
  gut microbiota DNA sequence
agccggcggcttccccgtgcaatcatacagcacccggttaacccccttaacctcattcacaatccggctggtgaccttccccagcacttcccacggaatctgagctgactccgcggtcatgaaatcagatgtaagcacagccctcagggcaacagcataatcataggttctctcatcgcccatgcagccaacagaccgcatattagtcagagctgcaaaatactggcccagattcttgtccaccccggcctttgcaatctcttccctgtaaatcgcatcagcgtcctgtacaatgcggaccttatcagctgtcacctcaccgataatcctgacgcccagaccaggtcccgggaatggctgtctgaataccagatactcaggtatacccagctccagtccggcctttctcacctcatccttgaaaagcagccttaaaggctctaccagttccttaaaatctacatgctccggcagtccgcccacattgtgatgagacttgatgacagcagatttacccaggccggactcaatcacatccgggtaaatggttccctgtaccaggtaatccactgcgccaatcttctttgcctcttcctcgaatacacggatgaactcctcgccgatgatcttacgctttgcctcaggctcttccacgcccttcagcctggcgtagaaacgttcctgggcattgacacggatgaagttcaggtcatacgcaccttctggtccaaatacagcctctacctcgtctccctcattcttacgcagcagaccgtggtccacgaacacgcaggtaagctgtttgccaatggccttggacagcatgacggcagccacagaggaatccacaccgccggacagagcgcacaacaccttaccgttgccaatcttctccctcagagccttgatggtggtatccacaaaggaatccatcttccagtcgccggagcatccgcagacattatatacaaaattggagagcattctggtgccttccttggtgtgaaccacctcaggatggaactgcaccgcataaaaattcttctccggacactccatgccggctaccgggcaggagtctgtgtgtgcagtgatgcggaagcccgccggcacctctgcaatgtacacgccgtggctcatccagcatacggtcttggaagaaacgccatcaaacagcttggaggaagtatccacatccacttctgtgtgtccgtattcgctgaccacagccttctttacaacgccatccagcaggtagctcataagctgagcaccgtagcagattccaagaaccggtattcccagctcaaatatctcctttgagcagcggggtgccccatcttcaaacacaacgtcaggtccgcctgtgaaaatgattccctttggattcatttccttgattttctccaggctcatatcataaggatgcacttcacagtatacgctgcattcgcggacacggcgtgcaatcagctggttgtactggccgccaaagtccaatacaataatcatctctctgttcatgagattcgttcctccattattttacggattttcccaccaaaacaattatagtaaaactgtatcccagaacgggtttgaaaataccctgtatccgacgccccacagcagcctgtctgatgaaagctgtgcgtaacccgcctgcttccgctgctgccagtgccaaaggtctaacccgatacaaaccatttccaaacccgcccttattatataccttgacccaatttaccgaaaaatatttattccctataaaattgaaagagattgtacagaatagtacaatctcttttttatctttcgtataaatatattataaagcagagaacgacaaatatcaagctatttcgatacttttttcagaattttttgctggctatttgacgagcatttatattatgattttttgccgagatttttctgccggaactcttcatcggaactttttaacaaactctcatcctccgccccatcttccgcactgcctcatcttctgctccgctccatcttctgctctgccgcaaaccctttaatcagataacttccttccgcagaatcctcgcaatcctctcctcatccagtccgcgtattacctccacggccattctgacagtggcgtccacgtcttcttccgcgcagaaattatagtggctgtgtacatacctggacggaatgcctaacaccagtaccgggaccgcctttcccgtgaggctgatttttccggcatttgtgctgccgccccggcgcactgcgtcctggtacttgattccaagcttatctcctgtctcctgggcaaaacgtatgaattccacgttggaaatgtagctgttgtccatgtggcgaatctgcacaccgctccttaagcatccctgggcaataccggcacggaaatagaaatcatccgccggtgatccctcaaacacaatggccaaatcaggctgaacctgctgtgccgtcaccgtggcccccctggtacccacttcctcctgggccgcaaatgcgcctaccacttccactgccagctggtccgcctcatcccgaagcgcctgcatggtgtcaataatgctcacacagcccagacggttgtcaaaagccttgccgtacagaattccattttccttatgatactcaaagcttacatccggcataatagggtcgcccgggcggattccatagacctccgtcacttcctcccggctgctggcacccacatccaccaggatatcctcgattgccagggagttgtcgtttttctgagccgctgtcagaaaatgaactggtttggatgtggtgattcccctgtgctttttcccgtcccttgtccttacgatgacagagtgggcgggcaggctggtgagatggaatcctcccagcatcagaatacttaaaagtccgttttccagtatggactgtaccatgaatccgcactcgtccagatgggcgtccagcatgagcacggggcgcccggcctttttcttcttcatggtggcgtaaacattgtacatagcatcatttgccacgtccaaacccccgcaccagttctttacttcccggatgacctcgtcctcaaatccactgggaccaaaggcattggtcaacgcttcgatttcttttatgtttgccatgatttcctccaggtatgagacgcaaagtgccgcatcacatggtaccgctcctgccataccatgcctgcggcactgcatctgcttaacttatttctgcttaacttatttcttctaaacttatttctgctttattgatttctactctatttatttctgcctaacttatttctgcctaactaattctgctctgtttatttctgccttacttatttctgccttacttaatctgcctcacttatttctgcctcacctatctctgtccaacctcccctgtctccgcaggaaaagccttacagtgaaaccttcttaagctcctcaatcaaatccagaatatagtcggctgtggtctgtaccatctcctggccccactccacggtggcggtgtttggatgatccggtccaatccatccattgtctgtcacctttggtgtgttcctgagaatttcaatctcaacacccttgaagcgcacggtacggaagccggtagccaccaggttttcggtgagattggtcatttccagagggaggtcaatcttgctcatatctaccagtgaggggtcaactgccatgatgccagctgtctcctcgccgccgccgtgtccgcccttccactcaggcttcatatcccaggccatcagccaccagttcagcatcacgaccatggcgcccttcttgtcaaattccaggccgatgcgctcgatggtcttgatattccctccgtgtccgttgagcaccagaattttccgcgcgccgtgcttgtacagcccgtccacaatctggtatacatactggtacagtacgtcggaatcaatgttgatggttcccggataatcagccagtgactggcatgctccgtagggaatcatgggcgcgatgaggatgttgtcatttttctcctcaatcagatccaggattttgtcaggtatcagggtgtcggttcccagcggcatatggcgtccatggcactccgtactgccgattggaagaatgaccatgtcattttccttaaaataccgttccgctgttggccatgtaatctttgataatctcatgatgcatctctccttttacttctcttattttgcaacctttacatgctccagcttgtggtagccgattggatccatcacgaaaccttccaccttggcgttggcgcctgcggtgatggtgctgtagtagataggtgcgttgttgttcacttcttttaacttcacagccaggtcctcatatgctttcagtctcacggactcatctgcgctggtccttcctgtctcaatgagcttgtctacctcaggatctccgatgaagctgcggtttccggctgctccctgctgtgaggagtgttccagtgaatagtaggtgtagtctgcgtctgtggtggaggtcacccagccaaagtatcccatgtcatgctcccctgcggaagtcctggaaataaagctgccgaattccattacctcgatgttgcaggtgattcccacatcctgaagcatggcctgtacagcctggcatacctctacacgtgtctggttgtcatttacccagatgctggtctcgaatccgtttggatatccggcctcggccagaagggattttgccttctcagggtcatactcataagcgccagggctgaagtatccgaatacagccggtgcaatgatggcgtcagccggctctccggatccgctggcaatggtgtcgataatcagctggcggtcaatggcgtagttaacggcatcccttaccttctggtcatcatatggcgccttgttcatgttcatggaaatgtagtagcaggtcagggacggagcctcaaacagctggaggtcggaattgctccttaccttctccaggtcatttggaagcaggtcgtaagccaggtccacttctcctgtctccagggcgatggttctctgggatgcctcagggataaccttcataaccagcttctgtgtctctgccggtcctgcatagtaatcgtcaaagcgctccagggtaacggaatcgccctgcttccactctacaaacttatatgggccggtaccgattggatgaagcttgaaggcttcctcgtctgcctccaccactgcctttggaacaatggctgcaaatggtacggaaaggtttctcagagccggtgcataaggcgccttcagctctacattaactgtataatcgtctaccacgtccaccttgtcgataaagtcaacaatgtaggaaacagcggcggaattaatggccctgtccagggagaactttacatcctctgccttcacctcagaaccgtcgtggaatttcacgccctggcggatgtggaatgtgtaggatgtatcggaattctgatcccagctctctgcaatctggggctgcagctctccggtcgcagcgtcaacaacagtcagcgtgtcgaaaatctggtccgtaacctctacagccggcgtctcctttccctgatggggatctaaggaagtaacatccgctccctgcgcccataccagcgtatccttgtactcccctgaaccaccggcgcttcctcctgcctctgctcccttggaacctgcctctgtctgagcgctgccgccttccgtggaggtctgtccggacttggaacagccggctgcacttactgccattgccgccactaaggataatgcaatgactttcttccatgtttttctcatactagctcctctctttcttacatttctctctgtcaatattgctctctataaataccggaccacaggctcctgccctggatttctccggaatttaaccctgctcctgaaccatacggcagctcacaaagtgccccggctccatttcctttaaagtcatttcattgctggtacagccttccgttgcataaggacagcgctttgcaaacctgcatcccggttccgggttgataggcgatgtgagctcgccctttagcggaatgcgctccatcttaaagtccggatctggaaccggtatggctgacagcagcgcctttgtgtacggatgcatgggattcttaaacagtgccttggcaggtgctgactccaccatctgtcccaggtacatgaccactatgtcattggaaaagtgccttaccaccgacaaatcgtgtgtaataaacatataggtaaggttcagctcctcctgcagatcctgcatcaggttaaggatctgggcctggatggatacgtccagggccgatacaggctcgtcgcatacaatgaactttggattgaccgccagcgccctggcgattccgattctctggcgcctgccgccgtccagctcatggggatatgtgtttaccagacgcttggccagtcccaccaggttcatgatcttctccacctgctgtgtgatggcggccttttcattgggcttgtaaataccctgcaccaacagcggttcaatgattgcctcgctgaccgtcatcctgggattcagggaagcaaaggggtcctggaatataatctgcatatccttcctcaaatcctttagctgcttcttgttgtagcccaggatatccttgccctcaaaataaaccttgccgcttgtgggttcgtgaagcctcaggatagcccttcccatggtggattttccgcatccggactcccctaccactcccagtgtctccccggtacggatggaaaagtttacatcgtccaccgcgtggagagtgcccttgggggttgtaaaatattttttcagatgttccacacgtaatatctctgttttctgttcctgcatatgtcaatctccttttcttagcggtagcggatgcagcggacctggtgggttccgcctacagtcaccatcccgggatgggtcttggaacattcaggaaccgcatacttgcacctctcgcagaaaacgcagccctcaggcagcttggtggggtcgggcatcatgccgtcaatggcctgaagccgcttcacatcgcttgtcaggctgggaatggaaccaaagagtccctccgtgtacggatgttttgtgtccttgtatatttcccgcagggttccgtattccaccacttcccccgcatagatgattgccacgtaatcacagttctgggcaaccacccccaggtcgtgggtaatgaggatcatggatgtgttattttcagatttaagcttgtatatcatctccagcacctgggcctgtatggtaacgtccagagccgtggtgggctcatccgcaatgagcagcttggggttgcaggccagggcgattgcaatgaccaccctttgcttcataccgcctgaaaactggtggggatactctccaaaacgctctgccgggattcccaccctttccagcatgttttcagcccattttctggcctcctgcctggacaggctggtgttgtggttctcgattacctccatgatctgctcgcctaccgtgagcaccgggttcagggaggtcataggatcctggaatatcatggaaatgtccctgccgcgaatggcctccattccattggtggaaagcttcaacaggtcctgtccctcaaaaatcacctctccgcccagaatcttgcccggaggattgggaatcagcctcataattccttttgccagcgtggtctttcccgcaccggtctctcccaccagtccaagggtctctcccacgccaatatgtatattgacgccgtttagcgcctttaccactccgtcatccgtttcatagtggatgaccagatcttttacttccaataatggtttatctgccatgtcatactcgtcctttcttagtgttcatccgtcagctcttcaaacgcgggtcaagggcatctctcagtccgtctcccaccaggttaagggccagaatggtgagcatgattcccatgcccgggatgatggtgacatgccatgcgtcgcggatatagcttcgggcattggacagcattgcgccccactcaggggtgggcggctggatgccgagtcccaggaaggaaagtcctgcgatggaaaggatggctcctgcgattcccagggtcacctgcacgataatgggcgccatggaattgggaatcacgtacttgatgatgatgcgccagtcgctgcacccaatggagcgggccgcttcaataaactcctggtccttcaccgtaagcaccgatgcccggaccgttctggcaaaggtgggcacataggagatggcaatagcaatcagcacattggtgatgctggtccccagggccgccacgatggcgatagccagaagcatggacgggatagccagaagaatgtccataattctcatgatgatattgtcagcggtcttgccgtaataccctgcgaaagctcccaggagaccgccgaagatacatgaaatgatgatggccacggttcccataaacagggagtaccggaccgcccaaagcatgcgcagcagcatgtccctgccgaactcatccagcccaaaggggtgtgccaggcttggtccctgcagacgtcccctcagatcctgctttaccacgtaattcaggtaaatggatttgcctgtaaccgcgtcaatgatgatggttgctattgctatgatgaccagtgccaggataaaatacatgccaatcatggccagccggttctttttgaatctgcgccatgcctcgccccacagggagcgctggtcgccttccgcttccgcggcaatcagatgtttctttcccatgaactgcacctactttctcttgtattgtgatttaattctcgggtccacaaaggcgtatatgatgtctaccgccaggttgaccacggtaaacatgattgccagaaagataacagaccccaataccatgggaatatcttttgacttgatggaatccaccatgagacgtcccaggcccggccaggaaaatacggtctctgtcagcatggcgcctcccaaaagggtgccgaactgcaggcccactgccgtgataatcggaatcatggcattcttaagcatgtggcgggtggttattttcttatcggaaaccccctttgccctggctgtgtctatgtaatcctgacggataacctccagcatggatgagcgtgtcatacgcgtaatcatggcagcagcccctgtgcccagcgtcaccgccggaaggaccaggctcttgatgagaggtatgaatccctcccccattccctgtgaaggcagccagcccagggtcagcgcaaacagaataaccatcagcaggccgaaccagaagttaggcatggccacgccaatcagtgagagcagcatggctgtattatccatcatggaatactgtttcttggcggaaataattcccgtgggaattcctatcagaatggctaccaggatacctgccactgccagcaccgctgtgttaggaaaccgctccataacctgtgaccatacgctcaggttatttttataggatgtgcccaggtccccgtgaagcatattaatcatataatgtccgtaacggaccagcagagggtcgttgagtcccagctcctccctcttcatggccagcgcctcggctgatgcctggtcacccaggatgattgccgccgggtcgcccggtgacaggttcagaatgaaaaacacaatgaacgtcacgccgataatgaccggaatcagcataagcagtctttttaacacatacttgtacatttttctctctccaatcctcgtatatttgctgcattaacgcagcgaagcaaaatacatatttcacaaccccgcacaggggtttgaaaccaaaataataaaaaagaagccttaggatttgaaactccctcgcttcattcaaattataaaacaatatatcaaaattgtcaacaatcattgtttaaattttacactttaaatattttgtcaacatttctattgtgctttttttcaaatctatgatatacttgtctgtatattaaatctaagtgtctctctggggcgcacacatcctggagccggcacatgtttgggaggtaagaaaatttgaaacagattggcggattttttacatatgaaccactgcccgaaaccgaaaaccattatctggaaaacctatgcccgccaggaggaagcctgcgctttttcatgtccggcagatgtgccaactactatgcgctccaggatatctgcctgtccgacaccaaaaaagtggcttatgtgcctgtctacacctgcgagacagtcctgtccccttttctgaaagccggctatgaacttttattctacgatgtatccagggatttgacccccatttttgatgaaagggtcctggaccgcatcagcgttgtcaatctctgcggctattacggcttttgcagctacgacagggaatttatacggaagtgctccgaacggggcatcatcattgtggaggatacgacccactccatcttctcagccgacggtgttgaccctcactgcgattatgtggtgggcagcatgcgcaaatggattggagtaccggctggcggattcgctattaagaggaaaggcggcttttcccttcccgttctgcctcctgacgaaacccatctttccatgcgcagtatgtccatgagaggcaaacagcagcttctgcaggcagggactcccgacccccaggccatgcagaagttcaatgataccttctgggacgccgagatgatgctgcgccgcatctttgattcctatggaagcgaccgggattcagagtacatcatccggcactatgactttgagcagctgaaacagagacgccgtgccaattaccagtatcttctggagcatatgccggaacatccccagattaccgtgatattcccggttcttaaagagggcgctgttcccagccactttaccgtgtatgcaaaggacagggacatggtccagtcctatctggccggacaaggcgtcaagaccaccacctattggccccagggccccatggtggacaccgaaggccatggcgacgcggactacatctacagccatgtgctgtcctttacctgcgaccagagatatggaactgaggatatggaatatatatgcagacagatagaggggatgcctgaagagtaagagctgaaacatagaggaagcatatgaattaaaagtatgaaccaacagtatgaaccaacagcatgatcgaacacatacatatatttaaaaagcggaaatacgggaacgtgatacaatcgtcttcacgtcctgcatttccgcttttgcacatccgcttttattttttgtccctgtgcatccgcaattacacatgataaaacagttcctgattcttcatcttcattccgatccggtaaattctctcgccgttggctatgtagtgggtattgattgcgctcctggactgttccaggttcccccgctgcaggatttccaaaagccatttatgctccagatagttatttccccgccgtcctgcctgggcagcaatgtcctcctggtccaaatccacctgttcttcagacacataaccgttgatttgcttgatggtatagaacatggctccgtttaaggggcttagtgtctcccacagactggtcagacgctccatctggcctgataataaaatctgtttatggaatatctcatcatactggatgattttccccatgtcgtcctctgacactgcctccttcatggccagcaccgcgtcctccatgagaaaaatgctgtcgctcaggagacgacccccgcaccgctccaaagccaggttttccaggttgccccgcaaaaagaatatctcataggcatccttaggcgaaagcatggtgacagagtaccctttattggtctcataatccagaaacccttcgtacatcagctgcttcagcgcatcccgcaccggcccccggctcatccccagcgttacggctatatcattttcaaccagcttttctctctgagccagctttccctgaagaatctgctccctcacataatctgctgccacctctgaaagacttctttttttttccttatccattacaatccccgctcctagcactgctctttaacctgtccattataacgtaggccctgcgcaaatgtcaaaggattttcaatatccatgatattttccagattgtccgagctgtaaaaagaccggctgacagaccggttcctgaactgagccggagccgctatggcatcacattccatctcacacacaggcacagccctacgccttcctgcgggccgccttatccctggtttccctataaattccgtctgttgtccacacatttttttattctatacctgattcctgtctttttagaaaaaggcggggactacctcatccccgccgcgctccggccgctcccggccgcatctgctgtcataactgttgtcaattcagatatttctttacatacattcccgtataggacaccggacaacgggccacttcctccggtgttccctttgcaatcaccgttccgcccttgtccccgccttccggaccaatgtcgatgatataatccgctgtcttgattacatccagattgtgctcaataaccacaaccgtgttgcctccctccgacagcctgtgaagtatatcaatcagcttatggacgtctgcgaaatgaagtccggtggtgggctcgtccaggatgtaaatggtctttcccgtgcctctcttggacagctccgtggccagcttgattctctgggcctcgccgccggacagctccgtggacggctgtcctagccggatgtatcccagtcccacgtcatacagggtctgtatcttcctggtaacagagggtacattttcaaagaacttaagagcctcctccacagtcatgttcagcacatcgtagatgttctttcccttgtacttcacgtccagggtctcacggttataccgtttgccgccgcacacctcgcagggcacatatacatccggcaggaaatgcatctcaatcttgataatgccgtctccgctgcacgcttcacaccggccgccctttacgttaaagctgaaccttcccttgctgtacccctttgccttagcgtccggagtggaggcgaacaggtcccttataaggtcgaatacacctgtgtaggtagccgggttggacctgggagtacgcccgatgggcgactggtcgatgtcgataatcttatccagctgctccacgccctcgatgctcttgtgcctgcccggtatggttctggccctgttcaacttccttgccagggatttataaacgatttcattcacaagggaacttttgccggaaccggacacgccggtcacacatgtcatgattcccaggggaatgtccacattgatgttctttaaattgttctccgccgcgccctttactgtaatccagcccgttggcttccttctctcggcaggcaccggaatcttcacacgcccgcttaagtaagctcctgtaatggaatccgggttcttcatgatttcctcggccgtccccatggcaatgacctttccgccgtgctctcccgcaccgggtccgatgtccacgatgcagtccgctgcccgcatggtgtcctcgtcatgttccaccaccaatacactgttgcccaaatcccgcagatgggtcagcgtcttaaggagcttgtcattatcccgctgatggagtccgatgctgggctcgtccaggatataggccactcccaccaggccggagcctatctgggtggccagacggatgcgctgggcctcaccgccggacaaagtgcctgtggcccgggacagggaaagataatccagacccacgtcaataagaaagcatatcctggccctgatttctttcagaatagaagcgcctatggtctcctgcataggagtcagcttcagcccgtccatgaattccttaaaccggactatggacatgttggtggcttcatatatattcatcccgcccaccgtaactgcgagggactcttttttaagcctctgccccttacagaccggacagggggtaatccgcatataggtctcatattccgccttggacgcttcggaaaaagtctccttgtagcggcggtttacattctcaatcaggccctcaaacgccacgtcatagacgccctcgcctctctgactcttatagcggaccttcacctcccggcctccggttccgtataacagcacatcgtggatttccttggggtaatcctggaagggcgtatccagcctgaaatcataagcttcggacagcgcttccaggattgcccttgtaaagctgcccttgtccgcacaggactgccatcccatgaccacaattgcgccctggtctatagacagggacttatccggaatcatcagatcctcatcaaattccatcttataccccagaccgaaacactccgggcaggctccaaagggattgttgaaggaaaagctccttggctccacctcgtcaatgctgactgcacagtcaggacaggaaaagctctggctgaaattcaccggctcaccgccgctcacatccaccatcatcagtccgccgctcagggccatgactgtctctatggaatctgtaagccttttttcaataccttcctttacaatcagacggtccaccacgatttcaatgttgtgcttgatgttcttctccagccggatttcctctgagagctcgtagagattgccgtcaatgcggaccctcacataaccgctctttctggcctggtccagcaccttcacatgctcgcccttgcgccctctgaccacaggggccagcagctggattttggtccgttcaggcatggacataatctggtcaaccatctggtcaatggtctgtttgtgtatctccttgccgcattttggacagtggggtataccgattctggcatataaaagcctcatgtagtcgtagatttccgtaaccgttcccacagtggaacggggattccggttggtggacttctggtcaatggaaatggccggcgacagaccctctatgctctccacatccggcttctccatctgtcccaggaactgcctggcataggaagacagggactccatataacgcctctgcccctcagcataaatggtgtcaaaagccagggatgatttgcctgaaccggacagtcctgtaaggaccaccagctcgttcctcggtatatccacggaaatatccttcagattatgctcattcgccccgcggattttaatgtactgctttgccatcgaacatgctccttgtcttttatcttaattggcttcttgtaaaaatgttctttctgcatagcgctgatacacagcgctgacagcctctagtatagcacatcgcctatgcatttgcaaacatttgttcgatgaattgctgcaaaattactggaacctcttccagcagactcctggcgtgaacccgctccgacatctggtgcgcatccttgccgatggggccgaataaaagggaggggaccctgaaatccgccatggcatccaggtccatccggtacatggttccccacagaggggcattgaccgcataggaggccatttcctcccgatccggtcccccgcagtagcttaaatccgatatcccgcagcagtaattgcgctttccaagacagagaccgcaggtgtcctccgccgccttttgcagcaggttatagagacgggtaccctctcctgcctgtatacctccttcctgtatacctccagtccgtcccgccctatctgtctcccccagcctgtcgctgtgaaaggccggataatatggcggcgcaaaagatataaccatgacaggcgaagtgatgcccgaaaacgtcagcatggcatccatcatttccagcgtagcctggggataattcatggcacctgttcgcacgtccgactctattcttccgtaaaggtcctgataccatttcccatatccttttttcttccggcatatctctgccagctccccgtactccagcacgcagtgttccaagtccaccttgggcaggatatttcccgacctgaccaggacttcctggctctccatccgcttcatataggacgcaaaggaccgccggcccatttccttcagccgttccatgacctggctggcggtctttgaaaatcccagcatactcatatatccggctgcccgcagggggacagacacatcatatccgtacttgcggtcccgcagattaaaccaggtgggaggaggacaatgctctccctcaaaggtctcggaaaattcaggcgccagttccgtggccataaacatctccgccagcacgccgatggcattcagtccgtgaaagcattccaccacatgcgccttggcgccctgtacaagaacagccggcatgattttgcccacagaccctatatagacctgctgcttgccgccctcattaaagctgggctccaaatccacaagacagtcatatgtaagcccatattcctgccgcagccctgtaaacagggaaacagctcccctcatccccgcagaatatgcctcctcgtccgccaccgccgcaaagagcaggtttccggttgtctcaggatattccagcaccttctgtccaaaccagtccatgatggcaaggccaatggaaagcccgcctttcatgtcgttcactccccggccgaacagccactcccctgacgccaaatcatccctggcctcctggggcagcatggacttaagcgcctccagttcctccccgtggatgtgcttccatgcctccatatcatatgccagggcgcggaaccgtccatactcgtccgtgtccaccacgtcgtaatgaccggtaagcacaaccgtcccggctcccttccctctcacaaggccgtacacaacggtccgtcccagactgtcgccttccagagcgcactgcccgcagagggacgggtgtttcgcaaaatagggctggcgttccagacatcctgcgatatagtctgaaacctccttctcctgtggggtgttggacacgctgggaatggaaaccatcccccgcaggtaatcatatatctgtttttcaaacaacaaagcaaacgcctcttttcctgaatactgcctttattttatatatgacccagtatattccattcattccgggatatcaatacccattgtataacctgcacaaaaaaccttgtaccaaaatggttgttttaacgaaaataaaattccctattttaataaaacaacagggttgctatcgtagatgcagaaaacaagtttgttattacgtaagggtaagcaagactgttaataatactttcacaggggtattgtaagcagtttttttatatcatgaaattcctgtattcattttatttcagatatagcggagggaaaaccattgaaaatcatcagagtcctgaatacacatgcggtggtgacactggaccgcaaagaccctcccgggccggttagatactgatattctatccgtcctgcgggagggtcttttatcttacttatttatcatttttattttttacttatctgtttcgttctttgcttatctgtttcgttctttgcttctctgtttcctgtactgcatgacgattccttccctggtatccggcatcaattccctaccgttcttccctgaaatacggaagtcccaggctctggggcggctggtattctctcttctttctcaggctggttataaccaggaccacaatggtgaccacatagggaagggctttgaatatctcctgggcgcccctgtccaggccaggtatatacagataaaggatgtacagaccgccaaacaggatagaaccccagatggcattaaccggtttccacagggcgaagatgacaagggcgattgcaagccagcctctgtcgccgaatccgttgttggtccaggtaccgccggagtattccatgacaaagtataatccgcccaggccgctgatgcctcctcccaggcaggtggccagatacttgtaggccgttacattgatgccggccgcatctgccgtggccggactctcgcccacagccctcaggttcagtccacgtctggtcttagccaggaaaaacgccaatgccagggccagggccactgccagataggtcagaaatccgtaggagaaaaaaatctgtccgatgacgccaaacttggacagtccgggaataggagtcttataggcagcgcctgtcactgccacggaaatctgtcccactccccctgccagctttgccagggaaccgccgaagaagttgccgaagccaaccccaaaggtggtaagggcaagacctgtcacgttctggttggcccgcagcgtgatggtcagtacactgtataccagtcctcccagggcagcgcacacaaaggcgcacacaaaggaaatcagaagccccaccagaccgtttggattggctgtcccgttttcatacaggaaagccccgatcagtccggcaatgccgcccatatacatcatgccgggaatacccagattcaggttgcctgatttctccgtcatgatttctcccagggctccgtacaggatgccgataccctggccgattgctttctgaataaatataactaaaaaacccatatttcagcctccttatgacaattttgcccctgcttctttccgtttgctgcggattcccaccttgtagttgatgaagaattcacagcccaggatgaagaagaggatgatgcctgttattacatcagaggcattttcattcaggttaaactgggaggcaatctgcccggctcccttttgcatgaataccaggaaaaacgacaccaggaccatggcaaatgcattgaacttgctgagccaggatacaatgatagccgtgaatcccctgccgcccgctgtgctggtggaaatggtatggctggcgccgctgactatgatgaagcctgcaatgccgcagatggcgccggacagggccatggtgcggattattaccttcttcacattgattccggcgtacctggccgtgttttcgctctctcccactaccgcaatctcatatccctgcttgctgtacttcaggtagatgaagatggccagggtcagcgccagcacgattaccaggttccagccgtactccaggccgaacagctttggaagccatcccccctttgtggaggagttgatggttcccacggagttggatccctttggattctcccagaaaatgatgcagtatgtgatgacctgcatggccacatagttcatcatcagtgtaaacagtgtctcgttggtgttccagtatgccttaaaaaatgccgggatggctgcccagaccatggctgacagggcgcttcccaaaagcatcagcggaaacagaaccaggggaggcagtgaattgcccaggtaaatcatcatggccgcggatgtgacgccgccaatcagaacctgcccctctgctccgatgttccagaaccgcatcttgaatgcaggcgtgatgccgattgctatacagagtagcaccagagtatcgcgaatggtcatccaggtacgccttttggtacccactgccccgtcaaagattcctttataaacctccaggggattaagccctgtcagggcatagatgacccctgcacagaccaccagcgataagagaaccgctcccagcctgatggcccaggccttccacatatcaatctcatccctcttggaaatatgcatcagaggttccttgttggacactgccgtcatctccttactcacttaatccacctcctgtcctggtcatcatcagccccacctgttccttggtcgctgtcctgccgtccacaacaccgtttacctgtcccgcgcacagcaccaggatacggtcgcacagctccagaagcacatccaggtcctcgcccacgcagataacggccgctccctgtttcttctgctcattgaggagatgatagatggtgtaggatgagttgatatccagtccgcggaccggataggccaccataagcaccttgggattggaagaaatctcccttcccaccagcaccttctggacatttccccctgacagcttgcgcaccggagtggcgacgccgggggtcacgatttccagctcctctatgatctgctccgccaggttttttggcgtctttctgtccgtaaagaaggaacgtcccctgcggtatcccctgagcatcatattgtccgtcatgtccattgctcctaccagtcccatgcccagacggtcctccggcacaaaggaaagctttatccccagcttattaatggctgaggcgctcatgccggacagctgcttttcgccgccctccggcggataataggtgatggttccgcccgtcatgggttccagtccggcaatggactccaaaagctccctctggccgcttcccgcgataccggcaatccccagtatctccccgctgtaagcagtaaaggaggcatggtccagggtggtcactccctccttgtccacgcaggtgacgccttccaccaccaggcggcgctccgggttcacaggatccgggcgctcgatgttcaggcttaccttcttgcccaccatcatctcggtcagggattcctcggtggcgtctgccgtatataccgtaccgatatactggcccttgcgcagtacggacacccggtctgacagcgccagaacctcatggagcttatgggtaatgataataatggaatggcctgcctcacgcatgttgcgcagcactgcaaacagcttgtctgtctcctggggtgtgaggacggctgtgggctcgtccagaatcaggatatccaccccgcggtacagaagctttacgatctccacggtctgcttctgggatacggacatggtgtatatcttctggtccggatccagctcaaacccgtatttggctgtcagctcattgattttggcggacacagccttcatgtccagcacttctcttcctgacagtcccaggataatgttctcagccgctgtcagaacatccaccagcttgaaatgctggtgaatcatgccgatacccagagcaaaggagtccttaggcgaacgaatggtaacctcctttccgtttacgaatatctgcccttcatccgggtagtagataccggaaatcatgttcataagggtggtctttccgcttccgttctcacccaggacggacaggatttcccccctttttacagacaggcataccttgtcgttggcagttaccttgccgaaccgttttgtgatatttttcagttcaattgcgtattcttcgctcacccggccaacctccgttctttgtatttagccttgttgcattgtctcgtggaaaaaagcggagccagatatgaatggctccgcttttacagcctttaatttccagcgggaaattatagcatctgctatcttagttgtcaattgtggtgataccgtcaatcaggatgtcaaaggcaggtgcggaaccaaactctgactcatggaaatatccgtcggagatatattcgatgtcgctgccgtccttcttatatgtatccagtgtctcgccgccaacggtccatgtggaggtgtcgaatacatgaagctcaccggatgccagcttggcctctacctcatccaccttctcctttgttccgggtgccacagccgcctcgttcagctctgtaatcagcacagcgccgtcagagaagcccttgcaccagtcaaccggaatctcggttccgtcaatgacatgctgtacagcctcagtcacatatgcagcccagttattggaagcagatgtaagagcctgttttggagcagtggcaatcatggaaatgttgtagcccacgcatggaacgcctgccgcctcacatgcggtaggagcgccggtggtatctgcatgctggctgatcagaacacatccgtcggaaatcagggcgtcagccgcttccttctccaggtcaaagcttgcccagctgttggtgtacttcacttccatggtggcgtccgggcatacggaacgcacgcctaagaagaaggaggtgtatccgctgataacctcagcatatggataagcgcccacataaccaatcttgcatgcatccgccttcacggttccgtcctctatcatctggttcagcttcagtccggccacaacaccggatacataacgtgactcgtagatggatgtgaaatagttgtgcatgttgctcaggccgctggaagctgcctggaagccggttgcatgacagaactggacatccggatactcctttgccgcctcaatcacataggactcatgtccaaagctgtttgcaaatataatctggcatccctggtccgcaaggtccatggccgcatcctttgcagtctcatcctccgggatgttccacttaacgataatctggtcatcgttcaggcccagtttttccttcatctccatggcgccgttgtaatgagcggctgtgtagccctcgttctcatcgcctatgtagacaaagccaatctttaaatcttccttggcaatgccgcctgcggccggtgcttctgaagcctcggtctccttggtctctgcatcctctgccgccgcagttgtctcagcctcagctgttgtggctgcgtctgccgcagtcgtctttgctgtgtcagatccgccgcaggctgccagtgatactgccatcacgcctgccatggccatgcttgctaacttttttaatttcataatactctcctccatgaagtgtaagtttgcagaacccgattaaaatacgtcaggtactggctgctccattacacctgacgttccatcgttgtcctacccattaaaaagtaacacaaataccagttaagtatatctacttttttccctattgtcaatattaaccagggaaatcgacccatttttacacaataagacaggattgcttttatttatcagcaatcctgcctttcattcttaagccatgcttataatttagtttctttcagctgcattttcataaaatacttcgcacataacacctgcaccgatgcggaacccatctgtaaaacactgggtcttctcaataaaggttagctccaggtaatgttccatcagaaggtcgaattcctccttcatgtccctgtccagcttgtcggtaaaccggttgaagtcgtccatggactgcctggtcagtgcatcgtattccgcgttgccgcgtatggtattttccgccgggcataagtcccccctgtacaactgctgcaaaatctttcccatacctttttcctgcctttcttttgtcaaattattttcacagaaaggcgggggccgtcacgccgcattctccatccgctctcaactcattctctcatcaaccaatcatcttctctcatcatctataaaggatatacgcagcgcagggctatggctcccccacctgtctatatatccaggatagcacagcccgtggtcaaatgcaactaaacatatcctattctccccggacctgctcttcttctccacggttgaagatttccatgaattcgtctcctgtgatggtctccttctccagcagataggcggctatctcatggagcctgccttcattttccctgagaatggaaagagccttcctatgctgctccttcacaatggacaccacctgttcatctatgcgctttgccgtgtccggagcgcaaatcagggatgtgtctcctcccagatactggttgttcacggtttccatggccaccatgtcaaactcatcggtcatgccgaaccgggtcaccatggaacgggcaatcttggtagcctgctcaatgtcgttggacgcgcctgtggtaatggaatggaaaatcagctcctccgccgcccggccgcctgtaaaggtggcaatcttatccagtgcctcctcccggctcataaggtagcgctctccctgttccacctgcatggtatatcccaatgcccccgatgttctggggataatggtaatcttctgaaccggggcgctgtggctctggcaggcagccaccagcgcatggcccacctcatgatacgccacgattctgcgctccttctgggaaataaccgcatttttcttctggtatccggcaatgaccgtctccacgctttcctccaggtcggcctgcaccacggcgctgcggcccatacgcactgccctcagggctgcctcgttgatgatattggccagctccgcgccgctggcgcctgccgtggccctggcaatggcattgtaatccacgtcatccgacatcttcacgttttgtccgtgaacctttaagatagcctcacgtccctttaagtcaggcagctccaccggcactctgcggtcaaagcggccgggacgcagcagggccttgtccagggactccggacggttggtggcagccaggatgactacgcccttctttccgtcgaaaccatccatctccgtcagcagctggttcagggtctgctcacgctcatcgtttccgctcatgcctccgccgtcgcgcttcttgccgatggtgtcaatctcatcaataaatacaatacacggcgccttatcattggcctgcttaaacagatccctgaccttggcagcgcccatccccacaaacatctccacaaattcagaaccggatatggagaagaaggggacgtgggcttctcctgccaccgcccttgcaagaagcgtcttgccggttccgggagggcccaccagcagcgctccctttggaagatttgctcctatatccgcatacttctgcggattgtgaaggaaatccacgatttcctttaaggcatccttggcctcctcctcacctgccacatcggcaaaggtgattcccgtctcattctctgcgtatatctttgcattggactttccgaaggtcatggcattgctgccgcccatgcgcttggaaagcatgcaccccataatatttccaatgaccacaaacatgagaatgggcgcaacccaggacatcagaaagcttaagagcggagaagcctttgtctggatttctcctgtaaaattctccacatccgcattctgcagccgcttaaccaggtcgtctcccggaatcggtcctgtcttatagctgacattccactgcttctggtcctttttcgtaaactgaatctgtgattccccgttgctgacgtacacatccttcacattaccggcgtccagttccttcaggaactcgctgtacggcacttccacggaatgctccatcatgggaaatacaagggcatttaataccatcactgccaatatgaccaggaaataatagtaaatgaacggctttttaggcgtgccgctttttaagtttctctttccgctgtcttcattcgcacccataccaggtctccttttcttaattcatactcataggccgggatacacgcagcctgattccagctgcatccgcttcccgctgttcaccatgtaagataataccatttgcaacttttgtcaatggttgattgtaagtttttatttacttttaatatttattgactttttacaccagatatgataaaacgattacagaatagagcgaggaggtaatcggcatgaaccgtgaaccagcagacagcagacatgtgggggaacatttcatggaatttgccattgatttttttaatctggcaaagaacagctaccaccagcagaaccagatacgggcgaattccgctgctttccaggtcctgatgcagttaaaccagccagacagacaggcgcccaccatgtcggagatggccctgcagctgggcattaccaaacagcagctgacaaagcttatcaatgatctggaagaaaagaacctggtccgcagacagcacagctccaggaaccggcgccatgtatatctgatgattacaccggaaggcgcatccatcatgaagcagctgagggaagccatgctggagtgcacggtgtcccgcctttcctcgtataatcaggaggaactggcggagctggacgactgcctgatacgtttaaacaccctgttggagaaattcgcggctgcggaggatatagcatcctgcggggattttcctgagttgtagggaatgggggagaggtacgcggacgcgtgtggtgattcgcgtccgtgagagacaggaatgcggggcaaaagatggccgtttccgcagtgggagagactaaggtggaagggacaggaaaacccggggaccgcaaaaattacgccggactcctgatgagtccggctccatgtttgctttgcttcgggcgttgagcgccctgcgcaaccccggcttttcctgtcccttccgcctaagtctctccgaactgctccaaagccacctcctgccccgcgttcccgcctctcacccactgcattcttcctgcgtccgctgcgtattccccgcagcgaaaaaaataatatccccgctaatgatattggacaattggcggactttttgcccgcttagattgtatccttgataattaatcctaaactaaaaggccgcatatcaagataatgcggtcctctttataaatggtatgccatctacccaggcatgccatttttcttctgatttggatataaacgatggaggtgctatgatacgcagcgggccctgcggttagatccgcaggcttggttctggcgtggatagcaggtgctgcatggtgcatcctcacccctctttacaataccttacttaagaaggacttcagacgctcatttttagggttggagaagaattcctccggtgcggcttcctccataaagtgcccctcgtccatgaacataaccctggtggctacctctctggcaaagcccatctcgtgtgtcaccaccaccatggtcatcttttccctggcaaggtcgcgcataacgcttaatacctctcctaccatctccgggtccagggcggaggtgggctcgtcgaacagcatcacatccggcttcatgcacaaagcccggacaatggcaatacgctgtttctggccgcctgaaagctggctgggatatgcgtgggccctgtctgccagtcccacacgctccagtagctccatggcctcatcctcggcttccttttgtccctttccctgaagctttatgggagcaatggtcaggttcttcatgatatccatgtggggaaatagattaaactgctggaataccatccccattttctggcggtgcttgtcaatatctgtcttagggtccgtgatgtcggtgccctcaaagaaaatgtgcccgcttgtgggctcctccagcaggttcagacatctgaggaaggtgcttttgccggaaccggaaggccctaccacaaagaccacatcccccttgtggatatccaccgtgattccctttaagacatcaatggagccaaagctctttcccaggtcctgcacccggattaagggctgtccgttaaacattcctgtattaccgctcattctgtctcagcctcctttccagtatctgtatcagctttgtaaatatcattacaatgatgagataaataatggcaaccgcaatcagcggcataaatgcactgtatgtcctgcttcggatgatgtccccgcccttggtcaaatcctggatggcaatgtagccggataccgaagtctcctttaacagggagataaactcgttgcacagggttgggagtactgtcttaaatgcctggggcatgatgatgtaccacatggtctgggcatagttgaagcccaggctgcggcctgcctccatctgtcccggatcaatggacatgatgccgcttctgaatatctccgccacataggctcccgagttgactccgaaggccaggatggccactatgaccttgtctaccctgacgcttccgaatacaacaaagtaaatgattaacagctgcaccaccacaggggtgccccggattacggtcaggtacactttacagattgcattgagcaccttaagcttatgggtcttctcataggtggatcgtatcattcctaccagaaatcccagcacaatgcccataaggcaggcaaaaaaggtaataatcaacgttgttttcagaccctcggtcagatatttccaccggttgtctgacacaaagttcaggtaaaacgcatctgtaaatgtcttccacatgctcatcatcctctgctctttctttatgattcataaggcagggcagacgccctgtttctcctctgtcatacagtcaaaaactgccgccctgcaggaacggggatgcggtgcagtattgcacctccctttctgcagcctgcggcagttttataccggccgtcttcctgtatatgccggtactgtcatgtctgtcttaagtgggcgattccatacccggtacgattactcagccttgatatacttggctacgatttcgtccagtgtgccgttgtccttcagggtcttaagagcgccgttgattttctccagcagctctgtgttgcccttctttacagcaatggcatactcttcatcggtaaaggactcatccagaatcttcagtccttctgtctcagcaacaaaggtcttggcaggctccccgtcgattacaaccgcgtcaatcttgccctggctcagtgcctgaacagcctcaaagcccttgttgtaacgctctaccgtggttccgtcagcttccaggtcagatacatagatatcgcctgtggttcccagctgcacgcctacgattacaccctttaagtcatcaggagaggcaatctcgctgtcctctgtaacgatgattttctgggatgcctttgcataagtatcggaaaaatctacggactgcatacggtcttccgtaacagtcatgccggccaggcccatatcagccttaccggatacaatctcaggaataatagaatcaaacgcaatgtcctcaatctccagctccatgcccagctcatcggcaatggcctttgcaatttccgcgtcaataccaacaatggcatctccgtcatgatactcgtaaggagggaactctgcgttggttgccatgacaagcttgccgcctgctgcttccttggctgcctcagtctcagccgcctctgcgctggtctcatccttgctctcggctgccgtggtatcctctgccttctcctctgctgttgtggctgctgctgttgtctcttttgcaccgccgccgcaggctgtcagggaagctgccatcagtgccgccatggtgatcgctaaaaccttcttcttcataataatattctcctcttttcttttatgcatcaaattgcataactataaatgtattcaacattttatattataatgcatttttctggtttagcaagaggaaaatacgggaatcaccaaagaatcaccaaagaatcagcaaagatgccgtctaattccctctctgtctccggcctgcaagcacaagatgcttggccagcacggccgttgtcacggcccctacgcctcccggcacaggtgttgccatggatgcaagaggctctatggacgggaaatccacatctccgcataattttccattttcatccacattaatacccacatcaatgactatggcatcctgtcccacgtgacggccgtccagcattttagcctttcctgctgcggccaccaggatttcagctctgcggcactctgtctccagatccctggtcctggtgtggcagatggtgaccgtggcattttccttcagcatcagcatggacagcggacggcccaccaccatactgcggcccacgatagtcacgttctttcctgtcatatctatctcattggccttaagtacctctatgaccgcctctgcggtacagggcgcaaaaccggttttgtcccctgcaaataccttggcaatattggccggggaaatcccgtccaggtccttttccgggtcaatcatcttctcgatgtccgtctccgcaatctgctttggcagcggacggagcaggaggattcccgatacatccgggtcacggttaatggcactgaattcagccttgaaatcgctgtcgcttatctgttccgggaacacatatgtctggacccgcaggccgaagttctccatcttcttcacagcaccccgttcgtaggacatatcgtccggtttttcccccacccgcacaatggccagcttcggagccgggccttccagaccttccatcatctgtgttacctgttccttgatttttgccgaaacctcggcgccttttaatattttcattttccttctccttcctttctgcctgacaccttctatctcagctgttcaagcaccttctgatatatgcggtccgctgcttctgtcccctccttaatcaggcgttccgccttctcgttcatttcttctgccttctccctgttcttcatggacttggtattgatgtacacattcatcaccgcgcccagcagtgcggtccggatgaactggactcccacgcccacatcgctgacagccatcctgcttcccttatccgcaaggatatccatgatttccagcatttccgatgccttttccatgatttccattggcacaagactggcatccaacagccgtgcttccatgacctctgccttgtatgccttttcttcctctgtacctgagggaaggctgtagcatttggccagaggcgcaaatacctttgcatcctggtcagccagcgcgctaaactgtccctggattcccttcatccgctctgccagttccttaatctcatcctccaccagcgcgtacttcttcttgcctatggtcagattggccaccatctgtcccagggcattgcccagggctccggccagggccgaagcgccgccgccccccggtaccggctcctttgaagataatacatccagaaactcctgaatcgtcatgctctctaccattgtaacatcctcctgtttttctatatatagtttatattatataacccatttacacaattttaactcccatcagcctggccagctcggcggcctgcagcaggctgacctttacacccgccagttccgtgaactgatccgagaccatgatgccgtcaatgacgcactctgataaatccattccctttaacggtgtacggaaaaaatccgtaccggccaggtccgtggaggaaaaaaccgtctttttaaatttcacctcagacatgaaggattcccggaaattacagccctttatttcgccgaactcccagaaggcagtagagaaattcccatagtggaactgactgtccagaagcttcacccacttaaacgtggagttgcagaactggcttccgtccccctttgagtctgatacattcacattcttccaataggtatcccggaaggagcagttagaaaaatcgcacttgtcaaatactacattgcagaaggacgcgccgctgaaatcacactcctccatcctgcacctgacgaatttcaccgtgtcaaactccactttttttcccgatatcccaacgaccgtctggtcttcataaaccttatccaaaatcggacattcctgattggctgcttccgccatatcctctgacagcatatctcctccatggtgattttattttgcccattccctgcactgttttaaccttagctctgcatcaaagcccatatctgttcccatggacgcctccatctcacagggaaaatcaggacattctccgcagtggttcagcccttttgcctcgcagcaggatttaacaccgcactcaccgccccagaagggcttttccatggttgcgcaccctgtacagcggaccgcttcctttctttcacattgattgcagcagactccgcatcttgactcaaacatattcttcctcctttgttacagcctcctaaacctgttctttccctgacatctgttccacatccaggcgcagtacagcggttctcttaagcatagcctccgggtaatcccagctatcctttcctgacatgtggcccatgatgcagttcaggccctttttcttttcctgtgtctcctccactacccggatgggtccttcccccaccacgcttcggtaccggaaggaatatccgcaggcctggtccgccgtcttaaggccatgggcagtgtccatctcaaaccctgcatacccggtctgcctgaccaaatccatcttcttcccctcggcagccccgtggaaatagagcgcattttcctcctcgtcgtatccgaagctgagaggtacaatgtaagcgctctttccatctggaaaagccagcctgcagcagtcgcactcccgtataatttcccttattccatatgtatccttaatttccctgtccttccttctcaccatattctccttatccgtgttctattccggcaaagcggtttcccggtgcctccatggttttgccataatgttgccatgattcccccacagcgcggccatggttccatcacagttcaatatatgccctgcttccgcctgtcttgtccttcaccacaacaatctggtgctggattcgttccttcagctctcccacatgggaaatgatgcccaccagacgccttccctctgccaggtctcccagggacttcatggccaggttcagtgtatcctcatccagagacccgaatccctcatccacaaagagagtgtccaggcggattccgcctgcagctgactgtatctcatccgacaggcccagagccagggaaagggatgcctggaaggattccccgccggacaatgtctttacgctgcgctccgtgccattgtaatggtcgatgacatttaaccccagcccgttcttccccctgttatcctcctccgtacaccgtttcagctcatactggccgccgctcatgaccatgaacctggtatttgccctggcaatgatacgctcaaaatatgccatctgcgcatacgtttccagggtaattttttcctttccccccacttcacctgccgctgtatcggaaagggccttgacccatgtccattccttttgtatctcttccatggacgccttctgttccgaaatacgttcccttgccatgcggttggtttccagtctgtggtgaagcctgcttttttcctgctccaggccggtcagcctctcccttgcctcagactggcgaagccggttctcctgcatccgcgcctccaggcgttccatagcggttctaacgtccatgccgcccggaagcattgtgtccggcccattcaccgggtcccggtcctctcccgcagactctcttccctctgcgtccttctccgccatccggcctctcagcgcctccaatcgggcctgagcgtccgacaccctgcggcttatccggttataggattcttccgcctccttaaacaccttttccagtccggccagaaatgccttcttctctgccagctccgcctgggcggccttcctgttctcatagggcagggaggactccatctccttaaggcggctttccagttccctttcctttgcctggctctctgccagcattttctgggcctgctgtttcaactccgaggctgcttccagggattgacgccctaagacccttctgccttcaatggcttccttatattcttttctcttcttcttttcctgaatcttctccttctgggcagcagcctggcgctccagctggcccttcagctgccccatcatcagctcccactgttcaaggaaatacctgcgtccctgccgtacatcccctgtctttgcagccaacgccccggcatcggcttccgcctggcgaatccgctgctgccagtcctctttccaggtagccacctcggcatcaatctgctgtttcatcctttcatagcgggtatccagactgcctgccagtcttcctgcctccaggctcagcctggcagccgccttatccttttcctcggcagccgccttaagccggtctaccttgtccttggctgcctcttttccctcctccagataccgtgcaggcgccggatgagtgacagagccgcatacaggacagggctggccttctgtgagccgtgaagccaggattcccgcctggttgtccaggaatctctggtacatctcccggtaggcatcgtctgccctgcggctctcctcgcctgctgccctgtaacgctctctggctgcctccagcttcttcctctcctgcccgtactgccccagctcctctgccagaagtccgatgcgcccgctgtattcgcccagtctctcccctgctgtcagggctgcctggtattcttctcctgcctggcgaaggctttccagtatcttctcatcgctgtcatttcgttccttccactgcctttcctccagggccgcctgctccagccttttttcaaggctctctgtctctttcctgcatgccttcagattttcctgcagcccgtcaaaacggtcataggttttcaggttttcttccatcctggtaacagcgccaatcagcccgtctctgtcagcctggcgttccttttccctctcatacctgacctttgcctgttccagaaccggcatattttccctgagcacatcctcggcagccgccatatcccggcagaccgcggcatccccctgcattttccccagctccattccaagggcagccatctcgtccccgaccagggccatggctctgtccttcccctgctgctgcgcctcatccgccccaatcagctggtccagcacctccaaaagagcttccaggcttccctggggcacctccttccagcgcagcttaagttcctcactatggccctctgtgataacacctccggcatactgttccatgctctttctgctgtccgcgtagcggccatacagacccttggcccggtccttcagcttttcctgaaacaactggtagggctttgtcttgaatatttcccggaaaatgatgccccgatcctcggttctgcctgacaggagcctggaaaaactgccctgggccagcatggcaatctgggaaaactgctccctgttaaggcccagaagcccttccacctccaccgttaccgctttgtcccctgtaacgagcctgccgtccggcatatgaagctgtgcgtccggcttttcccgtgtctccccttcacctctttgctttgtcctcatatactcaggattgcgccgcaccctgtattcctttccactataggaaaatcccatctccacataggtcctggcatccggcctggcatatttgctgcgcagcatcctgggtttgcggctgtccccgctggcgttgccgtaaagggcaaatgcaatggcgtcaaacagggtggtcttgcctgctccggtgtcgcccgtaatgagataaagtccccggtcccccagggaggccatatccagggtgacctcacctgcatatggtccaaatgcggatattatcagttctgtgggcctcatctgcttccctcccatatctcttccatcagttttaccgcaaagtcagcctgctgctctgtcatgggctgattgttctgaagctggtacagctcctccatcagaacaatggggggcttgtccgcattggcggcagcttccactaccctgccctccctggtgcgcttgttatcataatccagcttcatgacattgggataaatggagcgcagcttgcctattgcatccagtatatcctcctcatccgtaagggttatgtgaaggtaatcacccacagccgtaccctggtaaaaatcacggctggtcagttcttcatagcttcctctcagctcccgcatatcatggaggggcctgagagggcgggtattcacggtcacattccccttttccagcaactccaccacggtcactgacttcctgtggttcacctctgagaatgaatatttaaggggagtcccgctatagcgcagggtatcccttcccaccttctggggcccgtggatatgtcccatggccacataatcgaaggaatcgaacagttcagcactcacctggtccaggccgcctatggacagctcctccgagtcgcagcaggacgcaccggtgacaaactggtgggcaatcaggatattgcggccatcttcccctttcttatgttccgccatatgctccagagcccagcggaccgcatcttcaaaggtttcaatgccttcctccgggcagcaccttctcacaacagcaggttttataaagggcagcatatagacccgcaggcttccgtaccggtcctccagttgaaccggctccagatgaccgtcatacacaggcgccatataaactctcctgtccttcataagctgccctccaaaggccagccgctccgggctgtcgtggttcccgctgataacaaacacgggcaggttccggtccgccagcccggtcaggaaagcgtcaaagacctgtactgcctcagcaggaggcacaggtttatcataaacatccccggctatgagaacaccgtcaggcatttcctcctccgcaatcatgacaatctggtctaatatatatttttgatcctccagcatggaaaaaccattgacccgttttccgatatgaaggtctgataaatgaataaatttcatagttcttcctttcatgtacatctttaaccataataccacgagccgggcaccatttacaagaccatacggcccgtccttttccatgaggaccgccttattgaactatgaggaccgccttattgaaagattggactggacctctgcctttcaaatatggtaaactagagcgtaaattcctgtttggaggtgagcatatgaatccaatgaatcttcttcagttaaaaccggcctggaaccagtttaaggccaaccatcccaaaatgctgtcatttgtgaaagccgcatccagggacggggtcatggacgaggggaccctgattgaaattaccgtcacatccagcaccggccagaccattgcttccaacatccgggtcaaaaaatccgacctggaattcttaggagcacttaaggatgcgctggaagattagatgcaaagggcgcccgccctgccttgcggcaggaggacgccctgttgattagcgggatattctgttcttctttactgcattttctgacattgcatgttcagacatgctctagttcaggttaatacctgtaatggctgcctgtccatccacattgttgaaaataatgctgttttcctcgcccatgatgactccggcgccaaactgctccagcgtgtctacatccgtatcagcaatttcctttaacagactctcagtgaaaatctggcctgcatccatctttaagaaagctgactcgtcggcaatctcctcaccctgtccttctccaagggaaacatagaccgggtaagcgcacaggcctgccaatgcctccatatccttatctgccaccgccttctgcaccttctctgcgaaaggcttaatctcactctgttccagctctgccccggcatgggacacgtcctctgcctcctccaggagtgcggcctcctgggaggcggattcggatgactgggattctgctgcggtttcagagtccgaagcagcgcctgcgtcctctgtctccccatccgtcatcccggctgtggtgtcggcctgtgttaccacctctgccgctgtagtggtcttggcatccttgccagagcaggctgtgatggctgccgccgccataatggctgttcctaaaactgctaattttcttttcataattacgtctcctcatctatctgattttcagtatcattttctttatgtaaaagctgcatttccagagtccggtatgagcatgcacccctgtgaaatacgcatttcatccaccgcgtccggtgatacactctaacataaagagcctggctccttttgtcaaggcagccaggccaacattaatggttccgtaattaaacttaaaaaactgtttcaatccttttcctaaaatttcataatttaccatgcaacttttttggttttctttcattttgaaaccgtccattgagggctgttcattgctggcacttcattgtaaacagttcattccctggcaagggaaggacaaccgcctgccggtccgtcagcttctcagtgtggcccgcagacggtccggcttcagcagaaggtccagcccatcctcaatggagcgaaccaccacggatgcatggcttaacagggctgcgcacataccctcccgctccagaaccgctatagacagctgggctgcgtcaaacatctgtatatcattaaagccattgccaagacaggccacgcctccctcaagcccctttacgatttcttccttgcatccggcagcaccctcccgcggaaaagtccttacagttatgcccaaaggtccgcactggcgcgtcaccgtgccgtatgtatcagcagtgagcacatacacatgggccagctccttaagccgggcaatacgctccttgacccccttcagcagcatgccgtccactgccgctgtcccgttgtaatccaggaccacatggttgattctcaaaggcttccgcccgggtatttctattacaatcacagtctgtctcctccctgtatctcctgtcctgtatcttctatcccgtatcacttatccccatatccctgccggcccgaatccgtctatccgcagattccggcccaaatccgtttatccgtaaattcctgccagaaacgcccttgtctcctcttgcgccgggcacccgaacaattggcccgattccccccactctaccagacggccccctaaaagaaaggccccatagtcagatatcctgcgggcctgggctatgttatgggtgacaatgacaatggtatactgcttcttaagttctgtcagcatttcctcgattacggcagatgatttcacatccagggcggaacagggctcatccagcaatagtacttccgggtccactgtcagggcacgggcgatacagagcctctgctgctgtcctcctgaaagtttaagagcattcctgcccaaatcttccctgacctcgtcatacagtccggccatccggagtttttccttcaccagcgcttccagggaagccttatcccggacgccgtaatatctcggcgcatatgtcatgtttttatagatggaaaatggaaagggagccggcgtctgaaacaccagacccacacggcggcgaagcacatccttctgcatggattttatctcctgtccgtccaacaaaatccttccggatacagatacacccttttcctctgccagcaatccgttcatacaccgcagcagcgtggtttttccgcacccggacggaccgatgacggccgtaatccggcgggccggtatgtctaaggacaaatcagacaatacctccctgccgtcataggatgcgctgacattgtgaagcgtcatgatatgttccattttttctggctcctccttgcgtaaattgttgccaaaaggctgctgaataaaatcagcgccatcatgacaaaagcggtcccgtaagccgcgtccatggaagtggctccctgggccaccagcaggtaaagatgcataggcagggccatggccggggcggtaagccgggccgggaggccggaatacgccactgcccctgtgaatatgagaggggccgtggcccccatggcgtagcagcctcccagtatcacacccgacacgatctcccccttacaggccggcagcacaatcttccggatggtatagaacctggaacagcccagggcataggaggactgtaccagctgttttggcagctccctgaaggtcttctctgccctgacctctataaaaggaagaatcatcacagccagagccacaccagaggacaggatgcagcgcccccaggccaggtcccgcaccaggaagctgtaagcaaacagtcccaggacaatggacgggattcccgaaatacactggattaccatacggattaatcccgctgtcctgcgtcctttgcagtaaaacaccataaagagtgctgtggcgacagcagggattcctcccagtacaatggctgtcgccgtaaaacacaggctccccacaatagcaggccagattccgccctcctcccccagtaccgctcccctgggcggctgggacaaaaattcccagctgattgtgcctgccccccggtaaaaaacatatccgaacaggaacaaaatgatgcctgtcaccaataacatgctggaatacgcccagaattttgtaagtgatgcgcgcagatgcatggttttccctcctttatgcctgttccgtcctatggccccggcttatggttccggcttatggttccggcctattgctccagtttacttcgcagcagggtgatgccggaattgataaggaacaataagagcatcagtaccagccccgccgcgtacagggcgtggtagtgggtgcttcccaccaccgctgttcccatctccagcgcaatcacagcggcaatgctctcactcttgcccagcagggagggaaacaggtttgcatttccaatgaccatcatcactgccatggtttcccccatggcccggccgatggccagaatcacggacagcagtatgttcttccacgacccaggaaggacaatggtggccaccatatgccacttggagatacccagggcatctgctgcgggctgataccgttctctcaccttcagcatggtctcactgcaggaggatatcagaaatggaagcagcataacggccagcaggattccggccgccagcacgcaggagcctgtgtggactccggccctgatgaaaagcctgaccataagggtcagccccatgaagccatatatcacggatgggattcctgctaaaaggtccacaaagggatataggattccccgcatccgctgggtggcaacgcaggaaagataaatggcggcccccacccccactgtcacagccaggaccattgccaccagagatacgtagagcgtagccgctatgaaattaaaaatgccaaaggacggctcccctgtgtaagcaataggcatccatctccggcccaacaggaaatcaggcactgccacttcatcgaacgtgggcagtgcctccttgacaataaagtatatgacaaaggccaggaccatcacggtcagggcggtcagggcctttatcagaactgaaaataatgcattcagctgtttattcattggtttgactccatttcaggggattctttcaagggaatatttccctgacaatctccccggcgttttcccggcgcagattaagcctcaggtgtaaaggcaggtatgtatccgttggcctccaccacgtcatatcctgtctgtgagaaaatgtagtcaataaatgcctgctcagacggggtaatctctgcaccggtaacaaacataaccggtctctggatggtatacgcaccgcttatgatgttttcagccgtggcttccactccgtccaccttcatggcagtcagtacctgtccgtctgcgttggccttattataagcgccgaatcccgcataaccgattccccatttgtctccggcaatgttggtggccagctctgtcatggacgctgactgagttgcggacgcagtcacctcgctgtcacccataacactcttctggaacacttcataagcgccgccggataaatcacggatatagacattgatggcctcagccggcagcgtggagtccacctggtcccaggtagcaatctcacctgcaaaaatctggcggatggtctcaacaggcatgtcgtccatgatgccgcagattggattctcagcattgaccgacacggtaagggcatcctttgccaccacgaaatcctggtaatgctctcccagggcttcaatctcagagtccttgatatccctggccagcataccgaaatcagcggtgccgtcaatggcagcgcttacgcccacgccggaaccgcccggtgccacgtaaacagagatattggaatccggaaacgatgaatccaccgcatcccaggtcacatacttctcagtaaaggatgatgccagggatgacagaatcggatacagggatgtggaaccgcagaacaggatggatgactggaactgtgcggaagctgccccgtctgtttttgccccgggctctgtctcctctgcctcttttccggcagtctccttctcagatgccgcttcactggccgcagctgttgttgtctcagttgatgccgcattagagccgcaggcagtcagaaggctggctgccattgccatggatgtaactactgctataaactttttcatattttcctcccattgtcataaattccatatttgtacattttttgcaagtcaagaatagcacatatgacaaaggggctcaaattcaatttttctatgcatttccagtctgttattgctattttctatgacacggcgctgccaagggacggccccaaaaagacaccggctgccccacaggactgccgcagcgaaaagccgccattcctacagcagagccctcaccaccgcctctgcggaccgttcctccacctgcatggtaagattggcttcattgatatgctccagataatgggcatccgaattgctgataatcctacactgctccagatacggattatcacgcttcagctgatgcagtttcttcaggtccctgacctccgctgtcttaaaacagctgtccggagggataaagcccagatttgcaatcaggctgttggctgccttatccacatgggccggaaacatgacgccgtcataggagcggaccagattccacagactgtcaaaggatatttccgttgcgttaatcagcaaattgggctctgaagcgcacacctggtcccggtcatcgtaaatctgctgttttccgaatatctcttccctgttaggaaatttaatcagtttaccataaacataggcatcaaaatcaagtgccttctccaacgtagggaaaaggcacactgcatggacttcctcggacgtattgatttccatgccgggcactgccagcacgccgtactctgcggccgcggccatgaaagccggacagttgcggcatgtgttatgatctgtaagggctaccacgtccaatccttttagagccgccatgcccgcaatgttggcaggcgtcatatcatcatccccacagggcgacaggcaggaatggatatgcaggtcataagccaggttcatcatgacagcataccgtgaatcttaagggccgcttcaaagacaggcatatctgtggacagcaccgttatctcctggtcaagggccttcttcctggcggcgtcatccagaaccgctccttccgccagaatgacacaggccgtatctgtcagggcagacaccgccagtgtattcatgttggccatgacggtcacccaggcgcagcccgccggagcccgccccatggcaatactcagcaggtcgcagcaaaacggaaccgtaatctgccggtccaggctgtcacccaggttcaccacgccgaatatctgtttgtcaatcaattcctgaactgtcataacatcctcctctgctctcaaagcgtcgtcatttccggaactccggcctgcggcgctttcactcttcatcctcgtccttcttatccagcacggacatctcatccgagattctctgtatgtatcccttcaggatacgcagtgtctcctgccctccccggtctccgttatgcaggtcgtctgccagcacagccacttcctcggacagcttgtgcagattttcccgcagatagtaaacgcagtccgtctcattggcatcccccctgacaatatcctctgccagggccttacaggtaggcgctccgcaggaaccgcagtccagccccggaaactttttcatgaggcgctccacctggttcagcctggaaaagctctccatcatgttattgcccaggcggaatacgggctcatactggacgccggtcgtccatttaattacgttctcctcgctctcatgcatgtggctcctggccacaggcatgtacttgcgcaggcgtttcagtttaacctccgccacatagggattctccacagtcaggacaccgcccacacatccgccgttgcaggcgttcagctccacaaacctgagattggtaaacttctggtcctccatgtcctccagcacacgaatcacattctcaatgccgtccgctgccaggtagttttccgtaaaaagtccgctggcctctcctccgctgtgtccccagctgattccaattttccctgatgtaccgatgacaggataatcctctcccaccacggtcttcatacaggccagcagcttgggatacacgtccttaatagccagcacctggtcaatctcgctcttttccgttcccagaggtgactttacataggtcaccttggagggacagggtgaaatgaacataatgccaatctcttccctcggaagccccgtgtcctccatggcctttctgacagccagaacagcagccacctccaccggaggattgatgggaaggagatggggaatcagattggggaagcggacccgaatcagacgcaccacagacgggcatgccgtgctgataagaggcagctgctcctcatgctccgatatgtactgcctggtagcctcactgaccagctccgcagcggcgctgacctcaaacacatcgtcaaagcccataagcagcagtgcattgagcacaatattcacatcgtccagattgttgaactggctgtacagggatggggccggaagcgccaccgtgtatttatacttcttcatcacatccagcttatcataggtcgcaagctttgcatggtgggggcaaacccgtatgcactcaccgcagtcaatgcagaatttgttattgatactggccttgccgccccgcacccggatggcctccgtaggacaccgtttgatacagttgatgcagcccttgcacagggattcatccagccttacggaatgataaaatttatccattttaccacctcattctttcattctcgcatactacagattcaccaccatggtgattgtggtgccctcaccgattctggtgtcaatatccatggaatcagagtatttcttcatattcggcagccccatgccggccccaaagcccagggaacggatttcatccggcgcagtggaatagcctgcctgcatggcaagcttaacatccggtataccggggcccacgtctgccagtatcattttaattttctccgtggttatctccacggtaatgacaccccctttggcatggattaccatgttgatttccccttcgtacatagctatggccacctttcggatggcgtcagggctcacgcccatctgtttcagttttcgcttcacatcgctgctggcttcacctgcccttgtgaagtcatctgccgatatgtcatatgttaatacaattgcttcctccataattggttcccttcattattaaatatattttctcccggtatcagccggaacacgctgagccattccgggacacactgaatcaaacaccaggagcatcagattgccccgccgtgcagcccagcctggtacagcataccgcaggcggagaacatacggtggcccgtttccatgaccacaaggccccggtccctggccatctccaacatggattcatctggtttctttcccctaacaaaaatgatacagacaatgtctaacatctccgcggtccggataacctgcggattgcacagacctgtcagaagtacggagtggtctttggaaaatgccagtacatcgctcatcatatctgaaccgcaggccgactttacctcccgatccaggaattcttctcctgccagcactctggcccctaatacatctcttacatccttaaccgtcatacccttgtctctcctcactatcattacttgtcaattgtacacatttccgtacattatagcataccatccattttgtgtgttttcaatataattccgtttttttacatgttttttatcgttagaattttcacattaatagtagatttttttttctatacgtgataaaatattgatacattgcacaatgtacaactagtgaggaggtaataaaaagatggcttgcaaaaaacaaactgttccctttaaggggacgcctgagcaggaagcagcgctgaaatcagcgattgccgagctgggtgaccagccgggcgcgctgatgccggttatgcagaaggcccaggaaatttatggttatcttcctatcgaagtgcagaccatgatatctgatgagatgggtattccgctggaaaaagtctacggagtatccacattttatgcccagttcgcgttacagcctaagggtaagtacaagatatctgtctgtctcggtaccgcatgttacgtaaaaggttccggtgaaatcttcaggaagctggaagaattgctgggcatcaccaatggtgagtgcacagcagatggcaaattctccctggactcctgccgatgcgttggcgcctgcggacttgcgcccgtcatgatgattaacggcgaggtatacggaaggcttactgtcgatgacataccaggcattttagccaagtacaactaagcctatgatgacagagatttccctgaatgtattggatgtatcggagaattccacacgggcaggcgcctcgcttgtgaccattctggtaaccgctgatacaagcgctgacaagctgaccattgtcatagctgacaacggatgcgggatgacccctgaacaggcagcccatgtaacggatcctttctttaccaccaggaccaccaggaaggtcgggcttgggattccatttttcaaatatgctgcggaaagcaccggcggcagcttccatattgaatcggaaccaggtaagggaaccaccgtgacagcagtctttggactgtcccatatcgacaggatgcctttgggtgacatgaacgccaccatacacaacttgatcgtgtatcatcccgatacggattttctttatacctatacatacaacgatgcatcattcaccctggacaccaggcagatgagggagattctgggaggaatcccgctcaacacccccgaagtgtccgcttacataatggaatatctgaaagaaaatcaacaggaaactgacggaggtgccctgatttaaaggggtatcgtcaaacatgacatgtatcgcacgtaagcgcctgaaagacaggcgccaggtgctcataacgagccactccactaggttcgtgaaacacctcaccaagtggagatgacatgtatcgcacgtaagcggccaaaagacggccgccaagtgctcataacgaggaggataatcgcacatgaaaactcttgctgaattacaggcaatcagagaaaagatgcagagccaggtcaatatgcgtgccgaagaccacgatcatatccgtgtggttgtaggtatggctacctgcggtatcgctgccggcgccaggccggttctgaatacgcttgctgacgaagtccagaaaagaggacttaccaataaaatttctgttacccagacaggctgtatcggcttatgccagtatgaacccattgtggaagttatggagcctggcaaggataagattacttatgtaaaaatgaatgccgacaaagccctggaagtggtggaacgccacttggttggcggccatcccgtggagaagtacaccatgggcgctgcaggtcttaaataaaggaggaaagtacgatgtatcgttcacacgtattagtctgcggtggtaccggatgtacttcttccggcagcccgaagattatggaagctttaaaatatgaaattaagcgtcagggactggaagaggaagtggctgttgtagagacaggctgccacggactctgtgccttaggccctatcatgattgtatatcccgatgccaccttctactccatggtgcaggtaaacgacattcctgagattgtttccgagcacctgttaaagggccgtgtggtgacacgtcttctgtaccaggagaccgtaagcccaaccggcggcatcaaggcgctgattgacactgacttttataaaaaacagcaccgtatcgccctgcgcaactgcggtgtcatcaatcctgaaaacattgaggaatacataggtacaggcggataccaggcactgggcaaggtgctcacggagatgactccggacgatgtaatccagacccttctggatgccggactcaggggccgcggcggcgcgggtttcccaaccggtcttaagtggaagctctgtaagcagaacgacgcagaccagaaatatgtgtgctgcaacgccgacgagggcgaccccggcgcattcatggaccgttctgtgctggaaggcgatcctcatgcccttctggaggcaatggctattgcgggttacgcaatcggatccaaccagggctatatttatgtccgcgccgagtaccccatcgctgtggagcgtctgaaaatagcaattcagcaggcccgtgaaatggaactcttaggcaaaaacattttcggaaccggctttgactttgacattgacctgcgcctgggtgcaggagctttcgtctgcggcgaggaaaccgctcttatgacctccatcgagggcaagcgcggcgagcccaggccaagacctccattccctgcacagaagggtctgttcggcaaaccaagtatcttaaataacgtagagacctacgcaaacattcctcagattatcctgaacggtcctgagtggtttgcttccatgggtactgagaagtccaaaggaaccaaggtattcgcactgggcggcaagattaacaacaccggtctggtggaggttcccatgggtaccaccctgcgcaccgttattgaagaaatcggcggaggaattccaaacggcaagaaattcaaggcagcacagaccggcggaccttccggcggatgtatccctgccgagcattttgatattcccattgactacgacaacctgatttccattggttccatgatgggttccggcggtctgattgttatggatgaagatgactgtatggtggacatcgccaaattcttcctggaattcaccgtggaggagtcctgcggcaagtgtaccgcatgccgtatcggaaccaagcgcatggtggaaatcctgaccaagattacaaaaggccaggctgtaatggaagacctggataagttagaggagctctgccactatgtaaaggccaactcactgtgcggcctgggccagacagctcccaaccctgtactctccacccttcatttcttccgcgacgagtacgaagcacacatcaaggaaaaacgctgtccggcaggtgtatgtaaggcgcttctctccttcaacatcgaccgtgacaagtgccgcggatgtacgctgtgtgcccgcaactgtcctgccggagcaatcgtgggctctgtcaagaatccgcatgtcattgaccagaacaagtgtatcaagtgcggcgcttgtatggaaaaatgtaaattcggcgctatctacaagaaataatgagggagggaatatacgatggagacaattaatcttaaaatcaacggcattgcagtcgaagctcccaagggttccacaatcctggaggcagcaagactggcacatatcgagattcctactctgtgtttcttaaaggaaatcaatgagatcggtgcctgccgtatctgtatagtagaattaaaaaacggaaagctggtaacttcctgtgtctatcccgctgaggaaggcatggaggtatataccaatacacctaaggttctggattccaggaaaaagacattacagctcctgttatccaaccacaaccgttcctgcctgtcctgtgtccgcagcggacactgcgagctccaggagctggcccatgagctgggcgtggacgatgagggatattatgacggcgagattaccccgtctgaaattgatacctctgccgcccacatgatccgcgacaacagcaaatgtatcctctgccgccgctgtgtggctgtctgcgagaacgtacagggcatcggcgtcatcggtgccaacaaccgcgggttctcaacctccattggttctgcctttgagatgggtctgggagaaacctcctgcgtatcctgcggacagtgtattgcagtatgtccaaccggagcactgaccgagaaggattacaccgcagatgtatttgcagccattgcagacccgaagaagcatgtaatcgttcagaccgctcccgctgtacgcgcaggactgggcgaggaattcgggcttcctatcggcacggatgtggaaggcaagatggccgcagccctgcgccgtctgggctttgacaaagtttttgacaccaatttctccgcagaccttaccatcatggaagaggcacacgaattcattgaccgtgtacagaacggaggcgtactgcctctcatcacctcctgctcacctggatgggttaaatactgcgagcactatttcccggacatgacagagaacctgtcgtcctgtaaatctcctcagcagatgtttggcgctattgccaagtcctactatgccgagaaggcaggaattgatccaaaggacatcgtaagtgtcagcgtaatgccatgtaccgccaagaagtttgagattggccgtgaggacgaggatgccaacggaatgccggatgtggatatctccatcaccaccagggagctggcccgcatgatcaaaaaggcaggtatcaaattcttagacctgccggatgaggaatttgacgcaccattgggccttggaaccggcgcagccgttatcttcggcgctacgggcggcgtaatggaagcagcactgagaactgccgtggaaaccctgaccggcgaagagctgcccaagccggacttcacagaagtccgcggcacaaagggaatcaaggaagccgcctataatgtggcaggcatggaagtaaagattgcggtagcctccggcctgggcaatgccagggagctgttaaataaggttaaatccggagaagccaactatcacttcatcgaaatcatgggatgcccaggcggctgtgtaaacggcggcggacagccccagcagcccggacacgtccgcaacaccacggatatccgcggcctgcgcgcaaaggtgctctatgatatagatacagccaacccaatccgtaagtcccatgagaatcctgctattaaggagctctacgccacttatctgggagagcccggaagcgagaaggctcaccacctgctccacaccacttatgtgaagaggagtattaaccagcactaagcaccataccgtaatccacatgtaataatcacgtatattccgtaaagacagattttcaatggtttttgcaagcaatgtacatatatgcaaaacagcggaccgcaggcttgcccctgcatccgctgttttgctacattccaggaggataccatgacagcacgtcagaaacggatttgggatttactggcagaacacgactgcctgacatcccaacagattgccgcccttctgcacatcagtgacaggacagttagaagcgatatcaaggaaatcaacagggagcacgcctctgaggtcatccgctcaaaaaaaggacagggatacttcatagacgccggtcagcctgaaaagaacgtccccgcctcaaaaccccaacgtccggaagacgatctggaatgggccattatccggcaggttctattctgccgtgaaacgccctatctggaactggcagaagaactgttcatcagcgatacactgctttctaaaatcgtgtccgagctgaaccggaacataaccagacgacacagcctgcccgccatcctcaaacaaaacggcatcctctccctggctgcctcagaagaagaaaagcgttcctactacactctctatatcatgaaccggaatgttaaccattattttgacatggaacaattccagcccttttttgacattgttgatttaaaggagctgaaggaacttatgttccgtgaactggacctgcttagccggcatctttatgacactactatcgtccgcctgataattaacactgccgtcatggccgaacgggctgtatgcggctttttcatgcctgaaatgccttctgtcacgccggaaacgccctatggcaaatcatccgaagaaggcgccgtaaacacaggcagacactttttagaagaactgggttcccggctttttatttcctttcccccatcagaatatgagtatttttcccggctcttccaaaatgatttctattatgtaagggagcagccagacagccaggctgaaagcctgctggagaaaatactaatagaaatcaatgtggaatatggctttgacttcaccattgacaagagcttctgccacgaaatgacagaacagctccacggagccctggaacggagacggcacaggcagcatgtcatcaatcctgtcctatccactatcaagtccaaatatcccttagaatatgatattgcaatcttttttgcagaccgttttaaaaatctttcaggcatatccctgagcgaagacgaaatcagcctgtttgccatccacttcataagggccatggagacaaatctcggaaggacagagcaaagggtggggctgattaatccatacggaaaacagattaaggagctcatggtcaagcgcctgggggatatgggagagtgccgttttcagattgcctatacctggtctgtctttgattatccccatgaaatgcccaaggatatcctggctgtcctcaccacagttcccctgcccgtccagcccgcagatgtaccggtaatcctgtgcaggaacttcctgaactatcatgagaaggaaaaactgctcaccgttgtcagggacagcgaggtcaacagcatacgaacctattttaggacgctgttcaaaccgtccctgttcttcaccgacatggagttcgattcccgccggagcgccgttgcctttctgtgcggaaaactccgggaacagggctatgtgggacccggcttcctggaaagcgtcatgcagcgcgaatccattgctcccactgcctttgagccgggtttcgcctttgcccatgccatggaaaacaacgcgaaacggaccgcggtctgtgtatgtgtgctgaaaaacaagcttccctggggcgaatacaatgtgaagatcatctttctttttgccctggcgccaacctggaaccataccattattcccatctataatgtgatgattgataatctgtttaagaccaataccatctacaaactggcaaagattagggattgccgg

SEQ ID NO: 3178 - DNA, 104424 bp, Unknown
  gut microbiota DNA sequence
gactgagggtacatccctgcagtctgacatagggcacatatataatacatctattataattattatttaattatagtattttacatatggatttgcaagctgtatagtaatagcagaaaaaacaaatacatgatgatagttacatgtattactgttaaaagggggataccgtcatggtagttaacataaaatcaaaaaagcatgcttcctccagggttccgggacacgcgggcagccgcggctcccttctggcaaaactctttctctcaaccctgtacctgagcgcatttaccttcggtggcggatatgtcatcgtcacactgatgaagaaaaaatttgtggacgaataccactggattgatgaacaggagatgctggatctggtggccattgcccagtcctcgccgggcgccatcgctgtcaacggggctatcgtggtaggctataagctggccggcatggcaggggtactgaccgcggtcattgccactgtcctcccgccgtttaccatcctgactctgatctccttctgctacgccgccttccgctccaacctttttgtgggatggatgttaaacggaatgcaggccggtgtgggggctgttattgcccaggtggtctgggagatgggcagcggcatcgtaaaagacagacagtggatatccgtcctgattatggccgcggcctttattgccaattatgtatacaatgtcaacgtagttctgatcatccttttgtgcgccgccataggtgtggtgcggaccctctcttccgggcataataaaaaagggacggaaggaggcgcgctatgatttacttccagctatttttaagctttctgcagattggcgcattcagtttcggaggcggatatgccgccatgcctctgatccagaaccaggtggtcacccttcacggctggctgaacctggctgagtttacagaccttgtgaccatttcccagatgacccctggtcccattgccatcaatgccgccaccttcgtgggcacccgcattgcaggtacgcccggggccctggcggcgaccattgggtgcgtgctgccgtcctgcatcctggttacccttcttgcaaagatctatctcaaatacaggaatttaagcctgatccagggtgtcctcaaatccctgcggcctgccgtggtagccatgattggtgcagcgggcgtcagcatactggtcactgccttctggggactggcgggctttacccctgacctgggagccataaacctgcgttccgtatgtattttcaccggcgccatgatactgctcatacgttttaagatgaatcccatcctggtcatggtgctgtcaggactggctgagacagcctgccagctggccatgcgcgtgatatagcatctgcttatcattgactttaaagaggttccgatatagaatcgaatgggtacatcaaacaaaacacccggaggattctatgttagcggaatgtattgcacttggattatttctggcaggtctcggactctgcattgttacgggcatacagattctgtatgccctgttgttcggcctgctctgtttttccatctactgtctggccaaaggatattcggcaagggaaaccggctccatgctgtgggagggtatttcccaggtacggaatatccttattatttttgtatttatcggaggcctgaccgctgtgtggcgaatcagcggcaccatcccctatatcctatattatgcggtaggattcatacatcccaggtatttcgtgctctgcaccttcctcctgtgttcttccatgtccttcctcaccggtacctcctttggcacggcaagtaccatgggggtcatatgcatgctcatatcgaatgcagcaggcttaagcccctttcttacaggcggcgccatcctctccggaagctttttcggggaccgctgctcccccatgtcctccagcgcccagctgatatgcagcctgacccggacagacatctatcagaacataaagcttatgtgccgcagcagcgcaatccccttagccgtaacatgcatcctctatgtggtcctggcttccggttccagcgctccggcggacagggagctcctggacctgttcaggacaaatttctccctccactgggccgccatgcttccggctgtcctgattctggttctgtccctgttgcgcgtggatgtaaaatatgccatggccgccagcattgcagccggtgccgcagtggccctgtttgtccagggaacctcccccctggccctgctgcgctgcttcctaagcggatatgaggcccaggacgggacgcgactggcccagctgttgaacggaggcggcatacgctctatggtaaaggtgggcatcatcgtgctcatctccgcctcctactcaggaatcttttcacacacctgcctgctgtccggggtaaagcatgcccttttaaggtctgcccggcgccttactccctttggcactgttctggtgacctcggtcctctcctgtgcggtcagctgcaaccagagcctggccaccatccttacctgccagatgtgcgacgggctttaccccaaaaaggaaaagctggccctcgcgctggaggacacagctattctcattgcagccctgattccctggggtattgccggcactgtgccggtggccgccatcggcgctcccatgggatgcatgttttatgctttttacctgtatctggttcccctgtggaacctgattacggccctgtaccatgaccggatccgggccggacgcactgccttcacctcattcatgtaattccagcggcaggccgtcgggatcatgaaagaacgtcattctcctgcccgtaaactggtccatgcggacaggctctgtgtccactcccttttcattgagctccctcacggcagcatccatatcctccacccggaaagccaggtgtctcagtcccagggcttcagggtaacttggcctgggaggattatgcttccctgaaaacagctccagttcgcacccgtccagctccaggtccagcttatagtcatctttttccggcctgtaattttcccggatcactttaaatcccagaagctccacatagaattttctggacacctcataatctgaaacaataatagccacatggtgtattttctttaaatccatttcatacttcctcctgcttgcgcctggttattccccggctgtccctgctgcgggccgcatgtactctgtttcgtcccttttccacagactgttctctttccacagtcgggcaaatccctacaaaaagtcactgagataccagcgttttaagctcccctcctgaaacacatactccggcgtcttaaggggataggaaagttccgaggcataataccacggatcatccatatgaaggggattgttaagaatgtggaaatcctgggcgggcatatatccctgggccagaaggaaacagatgtccccatccccgttcacagccacatccgccaccataacgcagtgccccggacttcccccttttatgaacatgtcaccggcctttatccggcttatatcaatggccgtacactcattgtccagggaaagggtgcctgcgtacatcatcacatacttcatgtagagcaggaatgtctcataggaatcatcataagaagccttcttaacccacgacacctggtttccgtccactgacaggcggttcccctctctccaggaggcataatccatcaaaaatccgttggtaaggtgaaatgcaatctcatcaccggccccatgggcccacaagtactctccgtacatacgcatgaggctgtccgcgcactgctgcaaatcactgtcaaatacaggcagagcaaataccgctgcatgggctgtctggtttcccttttcactgccgtcgtacagcatcaccgggctccggtccggcttaaggggataggacctgatataatcctggaagcttccctccccggcatctgttctctgaaatcctgacggtacgggaatacgctctgaaagaacggctcctgagggattcacggcaattcccgttccctccggctccggcgaagctgtctgcgtcaccctctgtacatcccttccctccagtccggccacagcctgctgctgttcctccgccatctgctcatctgcctgccccggactgcatccccacaggaaagcggccagaaataccatacccgcagcccccctaatccatttaaccatatattcttctcctccctgtcacctgtccacaaccaccttgtcgctctttatggtctcccttttatccctgccgtcaggaacaaaccggaacaccacaaattccacatcctcctccgtctcattggcaaaggtgtgaaccgagcttcccacacggacaatctcctgctcacggaccttcctcgtcctctccgccccgtcctccagccagcggcaggtcagcaccccctttgttatgagaaggcactcatctatacgggtatgataatgccattcctgaacactccccggtgtaatccggttcaggtgaatttcggattcctcaaagatatggtagctcacatgggttccattgggcttctgtacggttatggcatcctccatgccagaaaaactgattggtctcatatgccggcgccctccttttactcaacagtttacagccttccggcacatgcgtcaatcctttgtgcgctccctgtttaagagcgcgctgtactcatgctcccaacaatggtataatgagcttaccgcaacacaaaaaaatgaaagaacaggggaattaatcatggaaatcattcaggtaaaaaaggacaaaaagaagtatctggacctgctcctgctggcagacgaacaggaggatatggtggaccgctatctggagcggggcgatatgtttgtgctgacagacggcacagtccgggcggaatgcgtggtgacaaaagaaggtcccggcatatatgagcttaaaaatatagcgacagccccccagttccatagacagggatacggccgccgcctgattgaatatgtttttacctattatccggatttaaggaccctttatgtgggaaccggggacagccctctctccctgggcttttaccatgcctgcggttttatagattcccaccgggtggagcgcttttttaccgacaattacgaccatcccatcattgaggacggaatccagctggtggacatggtctatctgaaacgggaacgggacatggcataactgccgcaaaaggaccgggaccaggccgttttgcctcccggctaaacctggcttccaaactccttcagccactttctccgggccttgtaatccggcaggatccgctccacctcagcccagaaccgttgggaatggttcatctcttttctgtgggccagctcatgaaccaccacataatccagtatttccggcggcatgagcaccagcttccagtggaagttcagattcccctgggcgctgcagctgccccaacgggtcttggcggcccgcacggcaatgcggttgtaatccactgccatgcgctttgcgaaataggcgcaccggttctccagctgcatcttagccttctttcggtaaagcttctccagctcagggtccttctcatagtctttgaccggcctggactgctcctgcctgcgccgctccataatcatgaaccatttctgcacaatccattcctggcgctcctttataaagtccatcacgtactggtttggaatgcgctccggcactctggcatacacatggccgtctgccttgatttccagtcctatggtacgccgtctggagtagaccacctctacgggaatgacaccctcctgttccctatggcgccagctaatctccaccttctgtatcatgtaacgctccttgttatcctacagaacatcggaaaaatggggacggagacgcttgaacatcttaagtcccagcaaaagcaccaccgcggtaaagccccagtaataaagggtcagtgtgggccgttcccagaaccagtttcctgttagcatggtatccctgtacccggccaccacataataaaaaggattcagcttgaacagcacttccacccattttcccgctccggtaaacatggattcgtggtacatgatgggagtcatccagataccgaactggaggcagatactcacgatctgcgccatatccttaaagaacacattaaccgcgctggtaaaaaatccgattcccagggccagcagtgaggcagccagggaataatacaccagctggaaccatatgacagagggcatcctgcctataatcagatacatcccaaacatgatgaccacaaaaaaggcatggaccagcagacaggatataagcttgataatgggcagtatttccaccttgaacaccaccttcttcaccagataattatactcctggagacagttggtaatgctgttgacggattcactgaaaaagaaccatggcacaatgcccggcaccagccactccacataagtgaacccttcaatgggaggcggggatttaaagcccattccgaatacgaccgcatagatgctgactgtcacgataggctgtatgaacatccacaccaccccaaagtaagagcccacaaagcgtttccggaaatcagccttgcccaaatcccatataagcttccgttttcctataatctctttcatcagagaaagcacataattcatataagtaaattccttttcatcagaacttgaaggtatccctgaggccgctccactttctgtccttatccgatataatcagctgcatgtccggttctatgggccagtccaccccgatttcagggtcgctccacagcaggccgccctcgtctcccggatggtagaagtccgtgcacttataagcgaattccgcttcatcggacagcaccaggaatccatgggcaaatccttcgggtatataaaactgcttcttattctctgcggaaagaatgacgccaaaccattttccgtaggtttcggaatcagaacgcagatccaccgccacatcgtagacagtacctctcaccacccttaccagcttgccctggggatactgcttctggaaatgcagccctctcagtacgcccttgacggacatggactggttgtcctgtacgaacaccatgccgagacctgcttccttaaaatcattctgattgtaggtctccataaaatagcctctctcatccttaaaaactgcaggttcaatcacatacagccccttgatgtcgcagggggtcactttaatctttcccataaatccattcgctccttttttattgtcaaacacgcctgaccggcccgcagccgtttggcagacgttatccacatccatctggcaattctatcactttatccactgactggcaagtccttatgcacttgcggaccgcaatttgggacagctttgtcacaccctcaggcataccaggctgaacaggcgcagcaccacgtagatatccatggcggccatggcaaacagcagtcccctgtcatcccagtccgtccgcaccaccttgtcatttttaaggctgagaaggaacatggggagcagcggaagcagatatcttccctgtacaccgtttatgacattggagctcaccggcgtccaggccagcagcatggagaacatcagcgctcccaggcataccaggcagagaaaccatatccacagacggcccttccattggataaaaatgctctctcctggttttctgagcgccagcatcaccaatatggctgtcagacccagtatgaccgcataaggggtgttgagcactgcatccatattccccagcgctcctccaatcataccggagtagagctgttccccctgccaggccagggtattgtaacacatcttaagcaccagcaagggactgtgaagcagctgtccgaaggtgtagcctgtttccccggcccaggctacatatccctggtcagcctgggtgtacagcgacaccgtcctgtggtttaccactgccatggccgcggcaaatgctcccagtacggaagcagccgacaggctccattttccccagccgccgaacttcctcaccggtatcaggagacagaaaccggctatgacgccgtacaccattttgcagggccccatgacagccatcacaagggccagtacagccacgtccctaacctccacgcgctcagctttataggccaaatcaaggcataccgctgaaaagtatccgctgagggctataatcatcacatcataagaaaaggaggccgccagatggagggtcatgggaagcagggctgctcctgctgccacctccttgccaaagggcatccttcgtatagtgagacatcccatggcagtaaaaaacataaggttgaacaggcgtcccataaataacagacccagaccgcccagtcccagcatccttgccagggcaatgcccatggcctggggaacataggccaggggcgtggtccgtaccggcatctggtatgacatgactgtgccctcctcaccagtgccgccaaggcccctctcctttatggtcctgtatgtgccctcctccagcttctgtcccagtacaaccgctgtttttccgccgttttccacagcttcataatccataactcccgtcaggtcctcgatgaatacatcctgggcccttatgaatacccgctcgtccttcgcccgggccgtcctgcccatcaggcggcttgaaagctggtaggcgctgatataatggctcacctcgtccggggctgacaggggaggaaggaccaccatatacatcaggccaattcccatggctgctgcgggaaatatccgcgccaggccatagtcccgccttaccaggaataaataccccactgccgccagtaccagtaccgcaaaaaccatcagcccgccgtaccatccgtagaggaagcggtccccggtttcaaggacaccggccctgacatccgtcatatgccacagtccaagggcaagaacgccgaaagagcctatcagccagacacagcgggaatgtccgctcagcaccctccccgacccggcatcgtgcctaattcccggtctgctctcctgtttcctccccgctttcttacctgccatctgtttcctccccggccgctttctttgtacctgtgacctccctgccgtcctctccggctgattccgctttttccaggaaccgctgtatcttaagctccagctcctccctgtccttctggtccagtgcaatgcgctgcaccagctccttttgcctgctttccatctgggacatctggagtgtcattccaaatacctttacaatcagcaggaaaatcatgaacaggaagagaaagttaggcgtggaataaattcccagcaagtgggcgcaggcatctgccacagccggaaacagtgagaacaccaccagaatcagggccatgataacccagaacagcgccgcctcaatctgtaccttagcctgccgaatcttccgcatcataaaagccatagtcaatatagagactataaccagaatcactctgaatatcactgtcatcataggatgaatcccctgccttcttttgttatttccaatactccttattcatactgcacgctgccgccagcttcacaggaaggatacggtaacacctgcccagacggtagccagcgtatttgaatccgctctttacaatcagtccgggcaccagccatgggcggcggtgggtcacaaggtaacgtgctgtctgtctgaccagacgtattccctcgccctccgagtgaatgcctgcgaacacctccggatggtctgcctgggatacggccaggtcgaaattgcgatggaactgggccgcgcacccataattgtgggaatgaatgactctggcctccgccacatacgcgatggcataatcgtcctggagcactgccttccccgcaaatatcatatcctcgttgaatatggtcttttgaataaaaccgccctggaaccagaacttctccctgtcataggcgcagcatacattggaggcaaaaaaggtcttgatgcccattcttcccaggtcctccttggtctttatacagctgtcctccggataattaaaggaacgggtaaatcgctctgccatggcgcagtccttatccggcagctgcctggcataggccatgatgaccgactcaccgccgggtcccctcttgtcaaaggcagccgccagatgctcaatcagtctttcatcggccggaaccgcgtcgtctgtcataaataccatgatatccgccctgctgcagcgggcccccctgtttctggtggctccatggtcaaattcctccttggacagatgatgcacttccagattgccgataccctcaaagcccttatcattccagtaggccttctctgtattcatgacaatgattttgcctatgggataggtctgcatggaaagcatctttaaaagcctggagaacttttttccgggcttgtaggtgggtatgattacatccacccgcagcacgcgctttctctcccggccatccgctatctcagtattacgtgttacttcctccattaccggcattctcctttttctcactctgataggcgcccgccgtatacaggccgaaacctatcactaatcctatcataagcagcagatagcagcctgccgccccattgattccaaattttgataccagaaagccggatgataccgcagccgctgccgcagctgccagatacacggtaaatatggccttctgtctgcgcatgatcacaagagcatagtacatcaggttggccagggcatagaaccctcctcccagaactatgatgatgaaagccccgtaatagctgaccagccttccttcataaccgctcccaagaatcatctccatcacggacagcacccattttcccaaaacagcagtggcccccactgccagtaccgttagtcccaggataatggcgccgatgcgcatgagctccttcttaaagcagtcatagtcccttccggtccacaagtctgtaagcctggtcagaaagggcctgattacaaaattagctaccatataaataacagaggtaggcataaaaatcaagttaaagtatcccgacgcagcgtcattcatcctggcgtcaatggcatacttggcagctgagaacacataaaagtccagaaaagccgatataaacaggaataaggtacttttaaacagccttcccgtctttctttcccccttgttccagtccaccgacggaagggcatggataacatccaggttaaacaaagcgattccggctgcctgggcagccaccgcggccagacaggagaacaaaaggtgttcaaacgccgccagcgtcaccagaaatacgctgactgaaaaaagagtacggaaaaagttggattttcccgtaagatacaggcttccctggcgttggaactccgactcatatacatcagcatacccatctattaccttgtatatgacaagcagaatgagaatcatgcatttgtccgccgggtaacgccccacaccgtgcataaaggtgaggaacacagcccctgccaccagggccataatacatgttatgttcctgtgctccagataatccccgaaggaatactcacctgttccgtccgtaatctggaagggacggataccaaaataagctacaatgaacatctgctgtcccagagtggaaaatccgaaggaaaagatgcctccctgtccgtctcccaccacccgtatgaccagaaaagacagaaccatgctggccaatgcatagacaaaactccctgcaatattccagaccacgttctgccgcccgatatccgttcctttatataataaatgtttcgtcagattcttcatatattctccaagctccggaggatagccggaaagcaattttcaaacgcccctagcgtttcctgaaattctgaatcataagaatggaaatcagcatcctggccatatagtggacggctgtcagcggtttcaaatagctctccccctccgtcctttcgtcaatggtcacctgcagctccgctaccctggcaccctgtttgatcagaaaagaaactgtatccggctccggtccgtaattcaggttaagggcaaattcctctatcatcttccggttgaacatgcgcatgcccgaggttggatccgtcaccctggtgccggtggtaagccggatggcgctgcctatgactctgctcccaatcatcctggccgaccatccctttttctccgtcacgaaccgggagccgatgacaatgtcatacccttcctccatcttctgtctcatggcctcaatgtactccggcctgtgctgtccgtctccgtcaaactggatggcgtagcggtaccccttcctgtaggcgtatttcataccggcctggaagcatccggccaatcccagattcaccggcaggtccagaaggttatatcccttttccctgcagattttggcggtgcagtccctggaaccgtcgttcaccaccacataatccagctggggaaaacccctgaccaggtcctccaccaccctctctatgttcttttcctcattaaaagccggtatcaccagcagtaccttatccatgttcgtctcctacatccccctgatgatgccgcagatacggtccacatcctccagctccagatctgcatagcacggaagcgtcagcacacggtcagccacataggctgccaccggcgtatccttggaggaaaatctgcccttgtaacactggaaatcattaatcaggggataaaaatattttctcgggtatattctgtgccctgccaggcagtcgtatacctgatcccggtcagctttaaagtcctcaaacagcacagggaagtaggcataattgggcgtaagcccttccctgaaggaaggcagcctgatacccggcacgcctgccaggccggacagataacgttccaccaccagcctgcgcctgtctatctcctggtccagatgatgcaggttgcacagtcccatggctgcctggaattcattcatcttggcattcccgcctacccataccacatgctcctggtccacaatcccaaaattcttaagacaattcagacggtgctccatccagtcctcccggaaggtaaccgctcccccttcaatggagttaaacaccttggtggcatgaaagctgaaaatactggcgtctccgaactcggccacgctttttcccttataccgctccccaaaggtatgggccgcatcgtatatcacccgcagcccgtgtttcctggctatggcctcaatccgctccacatcacacaggttcccatacacatggaccggcataatggccgaggtcttttccgtaatcagggcctcgatcttttccgggtccatggtgtaatccccgggacggatgtcgcagaataccggagtcaggttattgcgcacaatcgcatgggtggtggacgcaaagctgaagggggtggtaatcacctcgcccgtcagctccagggcctggatggccatttccagggccatgtgcccgtttacaaacagcaccatgttccggattcccatgtactccttaagctccttttccagctgtttatggaaatcccccatattcgtcagccaggcgctgtcccatatgggttttatcatctctatatattcttcgtaagaaggaagggaggaccgggtgaccagtatctccttctctttatcttcctgtccgttcatacgtcattttgtcctttctgcaggcctccctgtatctcaaagcctgcctccgcactccgctgcgcctctcactgcctgccttcacgcactgctgcgcctctcactgcctgcgcctctcactgcctgcgcctctcactgcctgccttcacgcgccgctgcgcctctcaaagcctgccttcacgcgccgccgcacatctctatgcccgatgccccgcgccgtcctaccaccgcatcctgcacaccacggtcagaaaccacacctctgccaggacgagtcccaatacagcccttgccgctgccatgcctgcggggccggttcccagatattccttatagtagtacagcttgctcctgtgaagcagcctctgcttatccacgatccgtttaaagcttttgtcaatgctgacagaatgggcatggacataggactcatccgtaaccagcacggtcttaagccccattttcctgaacttctgtcccagcaccttttcttcataatacaaaaagatgtgtttgtcaaatacttcttttatttcccccggcgtgagaatgcctgtctttaacataaaaaaggacccgggaaccgcatccaccaggcggcagtcctcatcccccgcatatgcgagcctgtaggaaggcgtattcagcatggccttaaacagccgcctggtaaccagtcctgtatccagcagatccttccacagaggaaggagggtccagtaagaaaacagctctccccccatcgggtccttcaccctggccgaggcagccaccgcgccctgtgtcttgtccagtgcatcctttacccgccggatacagcggggggtcacatgaatgtccgggttggcaatgattacatagtctgcctccagacagcttacggcataattgattccctcctggtttcccataccgtagccgccgttttgctccagcctgagcgcgtggaccttgccgccgccattcagtgtctgcaggcgcttccatgaatcatcggatgagtgattgtccaccaccaccacggagtccagacattcataatccttaacctcatccaccaatgacagggtggtataagagtcattatagttcaatataatcatgcttatcttatccatatcatttcccgcttccaaaagccttctgcttcctgcggctgtccaccagcctcattcccagcctgcggctgatccacagccggaaggcagggcagataaggcttacgtggttaaacacccaccacatgtgcatgtacagcctctttccctcctgctttggggttcccttccagggagttttatccagataatactcatagagccttctgaaatggttgtggttcccggctatccagggcctctcgtctcccagataatggatgatgacaggggcctttcccgcctgccggtatccgtcctcccccactgcctggtatgccccgcacatggacaccagggtcctgtatctgaaataccggtagttggtaaaataattataccggaccggcagcgtcatgattctgcccctcagcgccccgtttatggtatcctggtcacaggcaaaaaggctgccctgatggactctgtaaaattccagcagctgccccagcacatcctggtttctccatgcctccaggtccataagcaggactccggaattatagtaaggctcatccttttccatgccgatggattccttcatctccctgtaaaccgttggctccatcaccataccggccagatggtttccaagctccgtctcatacaggggacggatacttccgttcacaatggtatcacagtccagatacagggcctttcttacgctgtccggcagcaccttgggggcaaagaggcgccccatggcgcttatatcaaatcccctggtatccacagcatagtcgaaccgctccctcaggtttcccagctcagccacatgaaggctgcggcagaattttcccgcaacgccggccagtcgttcaaggtaagcctcactcattcccacggacaggatatatatgtccatccgggggatattcctgttgtggtctaacagggaataaagggaggctgccagatgtccggcatacccgtcattggaggcgtaaataatattaacagtttctgtattccaatccatattatggcacctgtttcttacattctctagtctttctaaggtcattttgtttacaattttacattatagcaggtaaaaagtaaatcacatctggaattttcctgccaaatatgatagattaagacatgtatggtaatctatataaaattcaggaggatgttacgaatgaataagttaatgaagcgtgctgccgcagcccttctgtccggacttctggtcttaggtcaggccggacccgcattggccgcgcaggatgattctaattatggtccggctttttccacaaaagtcgaacaaacctcccctggttctttagacggccagagtggagatggacagggctccggccctcaggcggtggctccggccaacgcagccccggcagaacaggccgatggcgccggcacagcagccggcagcaccgaggcagccgctggtacagccggcacggacggcgtgacctccgctgccacggaccagaacgcggcacaggcagcagacgattctgcccaggccgatgccgaggcagccgccgcagcccagtttgcagcagaggaagcagccagacaggcatcagccaatacaccttttcttcagattcaggtgctccgtccggataccacatggactgaccctgtaataggcgatacaccggtggtgtctgaacagggattccgttccatgtccgtctatctgaacaacatcgtgggcgatatcctttacaggacgtataccagcgcacacggatggagcgactgggccatgaacggcggccacacaactgtctgggaggacggtgccctggtggaagccatccagatgcgtttcaacggctttgtgggcaacacatttgatatttactactgcactaccctgaacgacgggacagagttaaactgggcgcgcaacagcgcaacagcaggaaccatgggcacaggaaaggtgctgagcagcttcagggtctctctctggggcaaaggtgtggaaggcgcttcctacaacatggagaaaccattggaagcagcgttcccggatggaatccaggttgtggacggggcagtggcgtacagcagcggcaacggcgttccatttaccggatgggcctggaatgacagggaccgctactactttgtaaacaatgcgcctgtaacaggctggcagtacatagacggtttcaagtattactttgacgaaaccggcaagctgctgaccgacttagagcccattgtgggcaacagcggcccgttcctcatcagcatcaacaagcagatgaactgtatgaccatttttgcacaggacggcgccaacggcttcatcatcccggtaaagacctatcttacctctaccggaccggatacacccattggaaccttccaaaccccggccaagtaccgttggcgtgacatgaaccacggaatcttcacccagtacgcgacgcgtatttacaagggtttcctgattcactccatcctgtacagccgtccggaccccatgacattagatccgctgacctataattatctgggtatcgcagagtcagccggctgtgtccgcctcctttccggagacgccaagtgggtatatgacaactgtgccctgggcacaacggtgaccatctacaactcaccaaagccaggcccttatgaccggccggctattgagtgggtcattccgggagaccagcactgggatcccacggatcctctctttgcccagcagcagtaatctttaaaccatgggtaatcaataaaaccaggctgtaacgcatacagcaaaaatggcggggaaccgttcactggaatcactttccagtgaacgtcttcctcgccatttcgtatactgccggcatggtgtgctcaaatctcaggaaaaaccgcatcctgggcgtaagctctttatagtacctgcggtactgtggattgaatatctcttcaaactgcttggtgtttaccattgtctggtaataagtcctgcgggcagcgctctctgccgcttccttaaacctgccccctgtggccctgtcaaactgctcataggtgcgcttcatacgatcacagtaagccctctgctttccctggtaatccccgttctttccctccacggtccaggagcctgccacgcccacccggtaggcgctcatggcctcgtcaaaataatacccgtatccatttgccgccgcaatcagctggatgggcgtatcccccacaggacagtccacatagtaatccggcagctccctcaccagacgggccggaaatgccatggacgacatggcgtatcccgaaggcttgtcaatgatttcctccggcggcagtacgcggctctcccggtacggcctcatctgtccctctgtcagcgcccttcccaccaaatctattttggcgctgtggatgcacaaggtacagtcagggtgggcttccatgtaatccacctgcttctgaagcttatccggtgacaggaaatagtcgtccccgtcacacataaaaatatactttcccctggccctggggaagttaaaggctccgctgatgttgtcaattccctgtgaatactggttttctgtctgaattaacggcttcacctggtccggatacctggccgcatattcccggataatgctgctggtcccgtccgtggatgcatcatcgtgaaccagtatctcaaatgcaaaatctgtcttctgcatcagaaagctgtccagggctgttctgatataatttgcatggttgaatgtaacacagttgatgctggccataatagctgtatctgcggtctgaggcccggttccgccttccactctgtctcccatatcctgtcacacctccctgtcactctaccttggtgatatattcttcgtattttctggcaatatacatgctcttgatacggtcgtcccgctctatttccctgccctcaaagcagcgcagatggtttgtcacacagtcatatcccgccaggcaggaaaactccaccccgccggaaaacctggggttgcactccagcatgtggtaaacgccgtcccggtcctctataaattccatgtttacgcatcccctgactcccaacagcccggcaatggcacggcaccgttcttccagctgccggttcctgaacaccagcactgaggttcccgcgccgtttaaggtccgcaaaagctccctgcggcagacggctgcgcacgtgccctgctcaggacttcgtaccacgtccaccgtgaccacgtttccctttatcatgggctggacaatataacctgccggatcggtttcccccaggaacccctccatctcacggcgggagcccacaaacctaaggccctggctgctccttccgttgcagggcttgcacacagccgggtagttgatttcatccaaatccgcatcctccaggcgcacagtgggaatcacggttccctccatgtgctcctccagataacggtacagctccatcttgtcgcggcacaggccgatacatgccttgtccgacatacataaggcggcatttatttcgccgaattcgcggcggtgcaggttgaacacatcgatctccgcgtccgtcagcgggatgacagcctttgccccttccttccggcaaatggacaacatagtctcaatataatggtctgtatccgatgcatagggaacctgataaaacgcatccacattcccggcgtccgcaatccactcaccgggatacacgtcgcagcctatgacccgcataccattttccctgcatttcttgatgacgatatcagccgaaaacgaccctatggctgtcacaaccactgtcctcatttttcgctcctcctgcttactctccacttgttatccctcattctgattgattgattcctgacagcttccatcctgtttactttcttccgggcagcctgtccactgccaggcccctgatataccggaacacttccaggcccagaacccaggatgccagcatgtacacaaccgcgccaaagagaatctgcattcccaggcccagccatcccccaggaacatatcttcccgcaaccatgacagccgcagccataaggattgagactgccaccgacggaatgatatccttccactgttctattatgctgtaattaagaaggcgcttattgggccacgcgttgatgaaggtgcacaggaaatccgccgcagccttaagcgccaccagcaccagtggattatagcgtatgcccactgccagaactgccaggcccaccatcttttttacaatttccaatttaaggaatatatcgctgcgtcccatggcattcagcgcctgaaggttggcaatgtgaatgggccagaaggaataggccacacacatgatttgaagaaagggaacacaggccagccatttttcccccaacagcagcagtaccatggggcgggctactgctataaggcccgccatcatgggaagcaccagataggagctgacggtgatggcccttcgcagcatggactttacacgctccggctcgtcctggctggctgacagcacaggcagcataacggactggatggcggctcccaggttgctgacaatcagcttgggaaactgttctccccggttatagttgcccagcatggattcattgtaaatcctgccaatcaccagtccgtatatattgttatataccgtatccagaagggaggcgcacagcagcttccatccaaaggcgaacatggtcttaatccgcagaatactgaacaaaaggcggggtttccagctgatgctcataaacagaatcagcatgtagaaaaagtaatatgcaatctgctgccataccagggcccatacccccagcccacggcaggccaggaaaatgctgattgcccctgatatcatggatgccacaaaggaggatatgaacaagcccttaaactccatattcctggacacataggcattctgtatggagattacccctcccggaaacaggaccacggccagcacccgcaccagagccgtcatctcctggttgcggtaaaagtatgcgatgccgggcgctgccaggaacaggaccaggtaaatgaccgcggatacagccatgttaaagaagaaaaccgaagaaaaatccgtgtcatccaccttccgcttctgaatcagcgcagtgctgaagccgttctgaaccaatacattggcaatggtgacaaatataagtatgacgcccaccacaccgtactcttccggcgagagcaggcgcgccagtatgatggaaaccaggaactggacaccctgggcgcctccattctccattaacttccaaaacaggccgtttaagacctttgtcgttgtctgtttttcattcaatgcctgttttccttcctttcttcatggaaccgcggacagaccggcacctcagggcacacctttgaaacaggctcccggtcagtccccaatgaacagcatctgccccagtgtacgcaccagcgtgttcttggtaaagccgtacttcacaatcagtcccatttttcccagccggccgcagcgaggcagtcttatgaaagcctccagtgtttcctgctgttcccggttcagacggctgtaaaacatatggtaaaagctgtccgcctggccaaacatcctcctgtaattctctctggcgctgcttccgtcctttacccgtgtcctgacagaatccaggctgtctcccttctcagctcccagggtattgccgccatgctgcctgtaatagtacaggggcctgtccacccatcctatctctccaaagcaggacgcgataagggccagccatgcatcgtgcataaggcagaccccgggaatctcctttagataaggcagcatactgcggctgaccatcacggcgcctccggtcacattgttctgtaccagaagctggggcaggctggtgcgttccggggaaattttctgataccggaaaaagctgtccgctatgggccgcaaagcctcatccgccacggtcaggtctgaatgcaccaaaaggggaacattgccacggcccggtttccgttccatttctttcatcttatcagacagcatccgcgccttttggggcatccagacatcgtcctggtcgctcagcataaaataatccgccccggccagaagccccagatgggccagctggctttttgtcatctcatactctggcagcaggctcccatgctgaggctgctcctccggaccatgggctgcatccgccatcagcttaaggagcttcaggaaatggacagctgctcctccggacggctccttccgtaaaagcaccagcacccggtccccctggcttgcctcatattccttcagcagttccctggagccgtctgaggaacagtcatccgacaccaggatacggacgtcctcctcatcctgtgccagtatggaatccagctgctgccttatatatctgcttccattataagaagccatcagtaccgtaatcattttgagcgtttcttccttccattcatccatggcagccgtgtctcaatcagacgcaccaccccaggctccactgccagcaccagggcaaaaagcaggatatcccaaggcgtactgcctaatactcccggatacatcattctgcctgccgccaccttaaaaaatgcaatgaccggaaccagatgggtacacatgacagtcagggaatgtgttccgtaatatgtaaagaacggcacaagaacccggctgaaaatccgccattccttccagctgcctccgcaggcagacacccgctccccaaacatcaggatggtgacagaggaaaaccaggcggtcagaatccaggataccggattttccatggtcagaaaattaaaatcacaccccggaatcaaaaccgtcaggacaatgcccaggcacatgagcagaaaggcagccgccaaaccggcccggccctttaagtacatggatgccttctgccacgcgtcacaggcaaatgtaccccccagggccagcaggaagcccaccaggcccttgatatacaccataatcggcagatgtatgacgcgccacagagtggtatcctgtctggaaccattgatatagaggatgaggcacacactggccgccccggccagacaggctgcaatccccattttcctgcggctgccgtatatcatgttaaacagcagctccgctatgaacatactgggaaggaaccacagtgtctctaaccccaccaatgtgcccgtataatagatgtcggacataagtaccaggaaggtatactgctggggccacaccaggaatatccgagagaaaataaacagcacgctgtagcacacatacggaattcccagggatataagcctttttcctgccatctcccggctggatatgcctgtcctttccttcccgtaacgcagcgcataccgccatcctgtatagacataaaaaacagccagcataaagaagccgtaccagtcagagagtatgcctaggctggtctccaccagacaatggctggctaccactcccagcattcccatgccctttgccacatccagatagacctggcggtcctgtgtcttagtcatctgccgtatatccttcctgtcctttgtcctgtcttatccgaaaatctcctctgccctgttcatggcagactcgattaccttgtccatgtcgtagtacttatattctcccaggcggccgccaaacaatacatgggattccgccctggccagttcctcatacctctggtacagctcctggtttttctggtcattcaccggatagtagggttccatgccctcctgccagctcaccggatactccctggtaatcactgtctttggctgtgtgccgaactcaaaatgcttgtgctcgattaccctggtatagggcgtgtcgcggtccgtgtaattcaccaccgccactccctggtggttttcccggtccagcacctgggactcaaaacgcaggctgcggtactccagcttgccgaaccggtagccgtaaaatgcgtcaatggtgcctgtgtataccacggtctctcccaggctgtcatagtgttccctgttttccaggtaatccgccgaagtctctatatcacagccctcaaacagcttctccactatgacattatatccccctatgggaattccctgatagggatcattgaaataattgttgtcatagatataccgcacaggtatacgtttgatgataaaggccggaagctccttgcagtccctgccccactgcttttccgtataccccttaattaatttctcgtacagttcccttcccaccagacggatggcctgttcctccaggttcttcggctcgccagtaatctccgccctctgcttctcgatgatggccttcgcctcatccggtgtggatatgccccacatgcggctgaaggtattcatattaaacggcatgttgtacatctgacctttataattggccaccgggctgttggtatagcggttaaactccgccagggaattcacaaattcccacaccttccggttgcccgtatgaaagatatgggcgccgtacttgtgcacatggatgccctcaacgtcctcacagtacacgtttccgcctatgtggttcctcttctccaccaccagacagcgctttttgttctttctggcgtaccaggcaaacacgcctgcatacagaccgcttcccactaatatataatcatattttttcatatccggatatgctcctttgcttctcgctctctttgctttcacaattgtactatgtttcacgggaaatgtaaatggattatgtcccctgccgcccccgcaaggtcccggacccgcaggaaaccatgaaacataaacggacgtacacaaaaacgcggaacacagacaatggcatccctcatttataaagactggatgccatgtctttgttccgcgtcccggttaactggtggtcatgaattgtttcagcgcatgaaacagctggtgaaaatcaatgggttttgctatgtggtaattcattccgctggtcagtgcctttgccacatcctcggcaaaggcattggcagtcagggcaataatggggatggttcgggcctgggggtggctgcttgcccggatcatgcgggctgcggtgcagccgtccatcaccggcatctgcaggtccatgagcactgcctcatatgtacctggtgctgaggaggtgaagcgctcatatgcttcctgtccgttttctgccccatccacttccaggccgtgttcacagagtatggccctggcaatttccatgttaagggcattgtcctccaccaggagaatccgccttcccgccagggaagcacagtccatgtcatcatcccggatgcagtctctcatatctcctgccctttcctgttcctttccctggattctgaaattcagggtgactgtaaaactgcttccctctccctccctgctctcgacatgtatgtccccctgcatggtggacactatgccatgggcaatggacatgcccaggccggttccctgctgctcctgcaccacaggcacgacggccctggaaaatggttcaaacacctgcttcatatattcctctgacatgccgatgccgttgtcctccaccacaaaccggtagcaggcccaccccgctttccccatggggacttcctcggtcgtcactcggataattccgttgtccggcgtgtatttcaccgcgttggtaatcaggtttaaaagcacctgcttcacccggttggcgtcccctataagcgactcatggatcacgcccttccggctgaaggttatgtcatggtttttctccatggcagtgggcttgatgatggaatatatgttatccagcatggtttccagatgaaagggttcctccaaaagctccagcttccccttctcgattctggacatatccagtatctcattaatcagggacagcagatggctgctggagatgctgattttttccaggcagtcccttacccgctccggctggtctgtgtgggatgctgcaagcgccgtcatccctatgattgcgttcatgggcgtgcgtatgtcatgggacatccgggccaggaaattacttttggcctcgttggccatggtggctgattcgtatgctgcaaacaggcttttcttattctcagcttcctcctccagctccttgcgcttctgctcatcaatgcccatattggcgaaaatgaccttggtgacaacaccgtctgcggtctccgcaatgctgaacctggacctcacccatcttataccgtccggatatacccggcggaaatccacatcgtacaccggctgctccggtgtaaggttcgtcctcagaaactccgggcttccaacccgccgcatcttttcctggtcctcctcatagacatgacagcggacgaatttctcataatacacagccatggaacccttgggaaattcctggcgcctgcgaatgatttcctcctgccagattgcctcctctatatcgtgctccaaatcaaacagatagatggaatagtagcactggcacaggttggtcagcacgctctcccgcagctccacctcctgcctggcatcaatattccgccctgttatgagaatccggtcgcccagttccatatggatgggaaccccatagtaacggtaataatgaagcttccggtcccggtcccggattctcagaatgccctccagggattctgtgtccctgtagctgtcaggagaacagatctgttcaagcttttctttgtcctcccggggaagggacggcatcacctggctgagtaattcgctgagcattcccttaggcgctatcttcagccggtctcccatgtaatggaggcagctgtactcctgacttattgggtccaggctcaggacaagagtataaatcgtggatacagccactctggccgtcacctcgtccatccgtttctccacctcaccgtcctgtatgtcaaatgccaggatagctctggcttttaaatcggattcaggtgcaaacggtatggccataacccgctgccagcttccgcttcggatacggtacaattcctctatctgcttttcccctgacaggaactgttcctgtatatattcatattccgcaaaccgttcaatcctgtttctgaattccggtctgatgcaggaccgtgaatatccgcggagaaattccctgaaatccgtatatttcgtcagattatcctttaaatcctccgcagccttgattatcttataggagccgtcccttaaatcgcacagcaggattcccctgtagcgtccgctcagggtctggatgaccgcatcatattccttctggaacatgatggtatccgtgatgttctggtggtatccccgcaggcggattccatcctcccattcctgatccttcatgccgccgcaccgcacggatataggcccccacaggggatggttccatttatactggacttcctgcacctctgcccgggtactggcaatcgccttggacacggtctcctgcacagctcctttgtattcatcctggattctgttataccatacctggtagcactcctccggtgccggcgcagcgtccagccccagaagttccagcatgacactgtccgcgtgcatgacaggctccctgccctgacagagtatgatttcccacagtcctgtgcgggtgctgcgcagaatgtctgtcttccctttatctgtaaagtaatcctgcatagaggccattcctttctcaggccggaattttcttccgccctctgtgcgtcccatttcgccgcctttcctctattatacacagaaccaccctgacatgacaagcaaataacaaaacacagtccctgcaataccgcacccgcgcctcttcttatatcacaatgtccttatatataccctgcattcataaggcttcagttgttccaatgtctgtccgcaatccgcttccccgtagttgcctatcagctgccggcagccttcaagctccggtttttctcccaaatccgcagcagaagccttcatattggccagcactacaagttcctgaccctgataggtgcgcctgtacgccagcacctgaggatgttccctgtatatgaattcaatctccccttctgatatgactttatattctttcctcagggcaatcagcctcttgtaataattcaatatggagccggaatccgctgcctctgcctgggcattgatataagaatggttctccggtatgcctatccacggctccccctgtgaaaatccggcatatcggctgccgtcccactgcatgggcgtccggccgttatctctggaacgggcagccagcaccttcagcgcttcctccccggtgattccccgctctgtcaggatacggtaatagttaatgctttcaacatcccggtacttggaaatatccccgtaatgcgggttggtcattcccagctcttccccctggtacacatacggcgtgccgcggaacatgtggatgaccgttgccagcattttggcagattccttccagtatcggccgtcatccccgaaccgtgatatggctctgggctggtcgtggttgcaccagaacacggcattccagccgttttcccgctccatgccttcctgccactccatgaacagctgtttaagccggaccaggtcaggctccgtcagtttccacttatccccgtccctgtagtccaccttcaggtgatggaagttaaagcacatggataactcccggtcctccggcctgctgtagcggatacagttatccagggtggtggaggacatctctcccactgtcaccatgtcctctatgcccgtatcccgcaccagctcctggagatactcatgtaccctgggcccgtcggtatagaagcggcggccatcccctttgtgatcatcctcaaaaatatccggtttggatatcagattcaccacgtcgaaccggaatcccttcactcccttggccttccagaacaggattacctccttaagctcctgacgcaccctgggattatcccagtttaagtcggcctgggttacatcgaacaggtggagataccattttttcaggcggggtacatactcccaggcatttcccccgaatttggactgccagttggtgggcggcgcgtccgggctcccttccctgaagatataataatccatgtactccggattgccctcaagtgccttcttaaaccatgggtgttccgtggatgtgtggttaaataccatatcaaacatgcatcccatgccccttatgtccgcttcccggatcagttcctccacatcctccatggtgccgaatacagggtcaactgcccggtagtcagccacatcgtacccgttatcattgagaggggagctaaaaaacggtgtcagccagatataatcaattcccagctcttttaaatagtccagcctgcttatgactccgcgtatgtcgcccaggccgtttcctgttgtatcctgaaaggacttggtataaatctggtaaaccgtactgtccttaaaatgtcccataaatggttcctccttcatatctgctccgtcatatctgctccgacaaatctgccccgttatatgactcaatctatcctggccaccgcatccgccaaagcccttacccttcgtccggtctgccagcttatagctcctgaatttccgggattggtaaggaccatgatgaccatgtcgctgtgccctgccccggcaatcttctcacggtcaaatgcaatcagttcctctccggctctgaccctgtccccgggctttacaaaggccctgaaaccatctcccttcatatccactgtatccagccctatgtgtaacagcagttccatgccgttttccagaaccagtccgcaggcatgcaggctttcttccatgacaacagccaccatggcgtcagccggcgccctcaaaacgccgtcttccggtttaatggccaccccgtcccccagtgccctggatgcaaacacctggtcaggaacatcttccatggggataacttcaccggatacatatgcctttaattccctgattggctggcttgcagagtctttcctttcctcccggctggcttcatggccggactcattttggttctcccggccgccgcctatccccttcttccttcctatggcataggtcaggcagaacggaatcaggattaccagtcccatggcagccgcgaagagtcccatgtactggggctggatggacaggatgcccggtatgcctcccacaccaatggcattggccttgattccgctgacaacagacagcaccgcgcccactgccgatccggccattgcgcagataaatggaaaaccgtatttcagattcacaccaaacatggctggttctgttacacccaggtaacaggaaatgcaggcgggtacggatacttcctttgccttggcgtcattcttctggagaagtatcatggccagtacagcggagccctgggcgatattggacagggcaatcatgggccacagggtggtgcctccaaagtcagctatcagctgaaggtcaatggcattgctcatatgatgcagtcctgtgattacaagaggtgcatagaaaaaaccaaaaataccggcaaacacgcccttaaagggagatgtcaggcccgcgttcacacagtctgaaatcacggcgccaatcttccagccaatgggtccaaggatgccgtgggccactgccacggatatcagcagggagcagaaggggaccacaatcatggaaatcatggcaggacatatttttctgaagaaccgctccaggtacaccagggtaaagccggccagcacagccggaagcacctgggcctgatatccaatcatatccacctggaagagtccgaaattccactttggtatctctgccgccgccgtggtggcaacactgtacgcatttaacagctggggcgacaccagtgtgattcccagaacgattcccagggcctgggtcgttcccatcttcttggtgatggaccagacaatgcacacaggcaggaaatggaatacggcctcgccgataagccacaggaagctgttgataccagcccagaatacagatatctgggtcagtgtcttagtgccgccgtcaaacagggcaatctccccgatgatattgcggaatcccagaatcagaccgcctacaatgatagtcggaatcaagggcgcaaatatctctgccagactgctcatgattctctggataagggtctggttctgcatggcagccttcttcaccgcctccttggagactccctctatgcctgccacctccgcaaaatcattgtaaaaggtactcacctcattgccgattatgacctggaactgccctgcctgggtgaatgtacccttggcagaggacaggctttcgatggcctctgtatccgccttggacggatcgtttaacacaaagcgcatcctggtaacacagtgtgatacggctgcaatattctccctgccgcccacatactccaacagtttctttgaatccccggtaaactttcccacgttcaatacctcctatgaatctgaccacgaaacagcatcttgtttaaacaagttccttatatccggattatatcttgtttaaacaagtttgtcaatgatgattttgattttttccggtgtttttcacattctgtacctaaaaagcaccggacgaacatttgcctgaagctccctgttctccgatgccttgatttgcctacttagtccgatgggccagatcgtaaaatacgaaccggtccggtctgtgcctggactgggtgaactcaaacatgactccctccttgttataggtcatgctgctcaccactgccatacaattataatcctttaaatccagatacgtttcatcaatctggttgacgcgctccacggtcattttcctcttggtggtcacaatgctttcacccaggtccttttccatatattcatagatggaacgctccgcgatctccggtgtcaggtcccgtaccacatcctttaagaaatagttgtggtcaatgattaaggcttccccctcaatgcagcgcacacgctggatataataaatctgggctcccacaggaaaggtggtcctcctttgtatggtctcatccacggtcagctccgcgaaacagaccaccctggtggtatagttcttcctgttcctggccactgcttccttcaggctctctatgccgcccagtatgaactccgactgctgctgtccgggctggtaaatgattctcactcccttgccgtggatactctgcacgtatccttccgacgccagctgcccgatggcccggcggatggtattccttgaacagtcaaactcttttaccagggtattttccgagggcagcagttcctggaacccgtaggtcccatcctccatcttttcccggagcgccatataaatctcattatattttgtctttgccatataaacctcatacatctctttttataatgggtctgccggataaatcccctgcgcaaaccaaaacagttttgtccgttttaaaccggcatgccccggaattatccgagaggaattcctaccacatacagccgtatgaaaaacagtaccattaaatgcagcgggtaaaaccaatagaaggcgtatttccatggtgcctgtcccttttttccgttgtaaaaatacaggggaacagcagacagaatccctgccccataacatatattccaggattccagtaaagacaggataccgccggacatcacctggacaatgcgcttctcccgcaggagataaaacaatgagataatcagtatcccatccatgtcgtaatccgccttcaaaaacacagcggccagacatccgcctccgattacggccgccatcccggcggcacggcgcggctgtgttaagccctcgctctgtttcaggccccggagcaccagcagcccgattgccagctcaacgtacacgttgctgcttcccccggcccacgtattccacacagccaggcggaaaggaatttccgagataagcgcaaacgcagccatcctgagccagtatctgcgccagtcccttgtatgaaggaatccctccaccagcaaaaagcagtaaatgggaaatgcaatcctcccaactgttctgagcatccgccacagccaataaagggtatccccccattgggatgtcatgagcatggcgacctgttccaggttcccccggtagtatacaatccgttccagcagcacagctccaatatggtccgcaagcatggtggccatggcaatatatttcagggcggtaccgcttaatcctacctgtatttccggtttctttctgctgaacggcatgccttcattccttccttatatctaatctatctatttatcttatcaccgggtgattggtttgcaaagtattttcttcacacattctttatgaagccaccagcttttcccccttgtatttatttccacatgatatataatgctctataagacttctgctaaaaagatgttaagaaatggaggattttatgaagaaaaagacacaattcttgttaaacctggcgcttaccgccatcttttttattttgatcattttccaggggcccaatctgaatcccctgtatccggatggggcattttcatggtgtttcatcatcagctgctatgtggtgctgaactttttcgtagccctgggcagtgtccgggtaggtgccaatgaatacggccgcccgcagatcagcattgacaaaagtgtaaggggttataaaaggggcttcgtccttctcgccatcctttgggtactgtattttggcgtttccatcctgtccatgcccctttttaattacaaggcctacagggaccagttaggcgtcccggccgtatcagaattcacggatacggtacagccccttgctttggaccagcttccaatcgtggacaagagtctggcaagagagctggccgataagaaggtgggcgaaaatcccggcctgggaagccaggtcatcctgggtacccctgtcatccagaaggtaaacggaaaactggtatgggtcgttcccctggagcattccggcttcttcaaatggcttaaaaacatggacggctccgcgggctatatcgtggtgtcggccagtgatgtcagcgacgtaaccctggtaacagactataaaatcaaataccaggccaacgcctacctgttagacgacttaaaccgccatgtgcgcttctttggcggcggactctttaaaggtcttacagactattcctttgagctggatgatgacggcgttccttactgggtcattacctcctatcaaaaccgctggctctttaacctgccggaggccgacggagtgctgacggtcaatgccaccacaggagagaccacccattataccatcgccacactgccggattgggtggaccgcgtacagcctgagaattttgtaatgcagcagatacagaaccagggtgtctatgtgcacggcattttcaacttctccaaccaggacaaattccgccccagccagggtgatatcatcatctataacggcgcccgctgttacctgttcacaggcctaaccagcgtgggatccgatgaatcagccattggcttcatactggtggacatggtgaccaaggaatccaacatctaccagatgagcggcgcaactgaaatggcagcccagagctctgcggaaggaaaagtccagcagtttggctaccgggcctccttcccaatgattatcaatctggatggacagcccacctacttcatgaccttaaaggataatgcgggcctgattaaacagtacgcctttgtgtctgtctccaactataccaatgtgggaaccggagagaccattgacagcgccctgcgcaatttccgccaggtgcgcggaaacgccggagtgaacattaccaccggccagaccatttccaaggaggagggcactgtcctgcgcattgccagcgaaaccatagacaatactgtcacctataaactgatactggaggaaaaacaggactatatcttcaccgtgtcctatgacctgagtaacgagctggccctgacccagccaggagacaaagtggccctggagtacatggatgatccgtccggaatctgctccgcatcgtcctttgacaatctggaatttgaccagtccgggcagtaacgggcagtcatatgacgatcctcccagagactggcgcagacctgccgcagacaggttaagcacaaaacaacgcaaaaaggaccggccccaaaaggccggtcctttaattgatttaataccattacatccaatataacatacccaatatcagctgccaattaatagaacagtctgttcaccgcactgaatatgccgcggagggaagcccttgtgatgttggagctgatacccacgccgtaagtggccttgcctgtcacctggtctaccagatggatgtaggaagcagcctctgcaccggaaccggatgccaatgcgtgctcactgtagtccagaaccttaatctggatgcccagggcatcctccatgcctctctgaacagcatcaataggtccgtttccaacgccctcaaatgtcttctcaataccgtgatctgagtaagtcaccttagccagtgttgcaaactcgccgtctcctgtctccgtatcggttatgcggcattttctgaagtgcatgggttccttgcgctccaggtaatttttcttgaattcctccatgatctgctcaggtgcaacctcaccctgctgctcggaaatcttctggatgacatctgcgaattccttgtgcataccctttggcagcttgaagccatagaaggtatccatgacaaaggccacgccgccctttccggactggctgttgatacgcacgattggctcgtactccctgccgatatcgctgggatcgataggaagatatggaacctcccagtactgtccgtttctctcatgaagggcctgcatacccttgttgatggcatcctgatgggaaccggaaaatgcagtgaacaccagcttgccggcatagggatgtctgggcggaatatccatcttggtgcagcgctcacatacatctgcaatctcacggatattctcaatgttaagttcagggttgattccctgtgagaacatattatatgcaactgtcagtatgtccacattaccggtacgctccccgttgccgaaaagagtaccctccaccctgtcggctcctgcaaggagggccagttctgtggaagccacaccctctcccctgtcattgtggggatggatgcttaatataatgctttccctgttcttaaaatgtgtattcatccattcgatctggtccgcatacacattaggagtggtcatctccactgtggacgggagattaatgataatgggattttccctggtagcgccccaggtctcctgcaccgctgtacagatatcaagggcaaaatccagctctgtgccggtaaagctctcaggggaatactccagacgaatctgggtatcgcagtcagccatataccgctggaccatcttggttcctatgacggctatgtcctttatatcttccctgtccttatggaacaccacatccctctgtaaggtggatgtggaattgtagatatgtacaatggccttcttaacaccttcaagggcctcaaaggtcctcttaatcagatgctcgcggcactgcaccagcacctggacctccacgtcatccgggatgagcttgcgctccaccagggtgcgtaagaaatcatactcaatctgtgatgcggcaggaaagccaacctcgatctccttaaagcccagcttcacaagaaggttgaacatctccaccttctcctccaccaccataggctccacaagggcctggttgccgtcccttaagtccacgctgcaccatatgggagccttcataatctccttattcggccatgtgcgctccgggaaatccaccacagggaccctcttatatctttgataatttaacataattcattcctccattctgttcatctgatttcaggcgcctgaaaacgcctggttccgtccatattccaatctcacttcatacggtgtcctgttccactttaaggtgatatttgtatcttcactcctgttttgaaacttcacttgtgtcctcagcccattccgggcagtcgctcaataacaccgtaatgacggatgatgaacagcacgactcttactggttcagccccatttcacatcattcctttgctctgaaaatcgctggccgtaaggacacaggcccctgtcagggccatacggtaaatgcagaaatcccggagcacggcgctccgggatttctgttgtcctcttagcaacgttatctaattatagcacatttcaaaataactgacaataaggagtcgccggttgactattctcaatagttatggcttttattcctctgtttcataaaatgtactccaagactccctcttccattttcagggaatcgctcacagcaccttgcatacggccctaaatacagtgcccccggtccttcataacctggattacctggtccacatatgtctcgcaggtctggatatcaggcgcctccaccatgacgcgtaccaccggctcggttccggactggcgcagcaggattcttccgtcgctgcccaggctcctggtcaccctggccacctcagcctgcactgcctcgtcatcctgggctgtctttttatcctttacccgcacattcttaagtacctgagggtaaatctccacctcagaagccagcttatcaaggggctgctttttctccagcaccacctccatcacctttagggaggtaaggattccgtctcctgtggtggcatgtttgctgaatataatatgaccggactgctctccgcccagacagtgcccggtggcggccatgttctcatacacatatttgtcccccaccgccgtcttcacataggcaatgccttcccggtcaaatgccttatataatccgaaattggacatgatggtggtgactaccgtattattgaacaggcttccctgctccttcatgtatttgccgcagatgtacatgatgctgtccccgtccaccacgcggccgttcttatcaaccgcaatgcaccggtccgcatcgccgtcataggcaaatcctatatcgcatttctcatctgccacaaacttctggagatgttcgatatgggtggagccgcagtccgtattgatgttcagtccgttgggctcattattcatcacatgtgtctccgcacccagggcgtcaaacacgtttttggcaatggcggacgcgcttccgttggaacagtccagggccaccttcatgttcttgaaggaacgggtggcaatggatataaggtatccgatatagcggttgcggccagctgcaaagtccacggtccggccaatatgttccctttttgccagcgggatctctcccatctccccatcgagatatttctcaacctccaggataacggactcttctagcttctcgcccttctcgttgatgaccttgatgccgttgtcgtaaaatgggttgtggctggcagaaatcatgattccgcagttaaatccctcggtgcgcaccacataggacacgctgggggtggtggtgacatgcagcagatatacatccgcgcctgaggctgtcagccccgccaccagggaatattcaaacatgtagctgctgcgtctggtatcctttccgataaccaccctgcagcgctcatccggcgtcttctgtccatagtaccagcccaggaaacggcctaccttgtaggcgtgctccacggtcaggtccacattggcctcaccgcggaagccgtctgtcccaaaatattttcccattgttattcattcctccctgtcttgttattaaagcccccgttacatgcctttgccgcagccgttccgcccccggtttatgccatcccgttgtccttaagagccttcaggtaacgctccagcgcattctgccatgagggcagacgttcaaagccgttctccgtcagcttttccttactcatacggctgttggagggccgctttgccttggcagggaaaccgtctgaatccacaggggtcaccttcacctcatccatgccggcctggcggaatatctcacacgcaaactcataccagctgcacagcccctcgttggtggcatggtagcgcccgtacttgtctgtctgaatcatatccaccagaaggcgggccaggtcgtaggtatatgtgggggaaccaatctggtcatttacaacggatacagcccccttctccttccccagacggagcatggtcttaatgaagttcttgccgttgacgccaaatacccacgcgatgcgcacaatgaaatacttctgtacattctgctccaccgcaatctcgccctcatactttgtcagtccgtacacattaaggggttctctgtgatcatcgggctcccatggccgttcaccgccgccattaaacacatagtccgtgctgatgtacatcatcttgatatccatggccttgcagaccctggctatattgcgtgtcccctcagcattgattttacggcacagttccaggttatcttctgcagcatctactgcagtatatgctgcacagtggataactgcgtctggtttttcctgagaaatcacagtttcacacgctgtgcggtccgtgatatccatttcctccacgtccacaccgaatccctcaatgccgcgaagggccagttcatccatcacgtcatggcccagctggccttttacacctgttaccagaactttcataatccatttacctccgttcttaataatggccggcgaaggacaggaattcccgaaacggacacgtctcacaaacgtgctccggggcatttccctcctccgtcagccacatgtttacctacaggcggctgccgtacatcttatcgaaataattgctgtactcgccgctcagtatattcttccaccagtcctggttgtccaggtaccaccggatggtctgctcaattcctgtatcaaaattatacgttggcttccatcccagctctgtttctatcttggtcgggtcaatggcatagcgcatgtcatggccgggacggtctgtcacgaacttaatcaggctctcaggcttatcaagtgccttcagaatggtctttaccacttccaggttggtgcgctcattatgcccgccgatgttatagacttccccctcgcgtcccttgtggataaccaggtcaatggcctggcagtgatccgccacatggagccagtcgcgcacgttctcccctgtgccgtatacaggaagctcctcatctgccagggcgcggctgataataaggggaatcagcttctccgggaaatgataagggccgtagttgttggaacacctggacacggtcaccggcaggccgtaggtcctgtggtacgccagcacgaacaaatcagcgcttgccttggatgaggaataagggctggaggtgtgcagaggcgtttcctctgtaaagaaaaggtccggtctgtcaagaggcaggtcgccgtacacctcatcagtggaaacctgatggtagcgcttgatgccgtaggtgcggcaggcgtccagaagggttgtggttcccatgacgttggtcctgacaaaggcctccgggtctgtaatggagcggtccacatggctctcggccgcaaagtttaccaccacgtccggcttttccttctcaaacagttcaaatataaatttccggtcggcaatgtcgccctttacaaatttgtagttaggcttgtcctctaccggctttaagttttccaggttgcccgcataggtcagcaggtccaggttgataatttcataatccgggtatttatttaccatgtggtgtacaaagttgctgccgataaagccggctccgccggttacaataattttcatgtatattttcctccgttaaaaatcctgtgggtgtatcttatccacatactttccgtccagaacgtcctttaaatacttgccgtactggttctttttaagaatctcataggtctccataacctgttccctggtaatccagcccctgagataggcaatctcctccaggcaggcaatcttgcggtgctgatgtgtctccacagtcttcacgaagttggtggcctccaccagagactcatgggtccctgtatccagccatgtaaagccctgtccaagaagaatcacatccagctctcccttctccaggtaaatgcggtttaagtccgtgatctccagctcgcccctggctgatggctttaagttcttcgcatactccaccacccggttgtcgtagaaataaagaccggtgacacagtagttggacttgggcttctccggcttttcctcaatggaaatagccttgccgtccccgtcaaactccacaataccgaagcgttccggatcgtccacatagtagccgaacaccgtggctcccttttccttgttcgctgcggcgcgcaggcgcttggcaagcccctgtccgtggaaaatattatcacccaggaccattgccacggaatcgcttccaataaattcctcaccgatgataaaagcctgggccagtccgtccgggcttggctgtaccgcatagctcagctcaatgccgaactggtggccgtcgcccaaaagagcttcaaaccttggcgtgtcgtccggagtggagataatcaggatatccctgattcccgcattcataaggacagacagcggatagtatatcattggtttgtcgtaaatcggaagcagctgtttggaagtcaccttggtaagcggatagagccgcgtcccgcttcctccggccagtataatccctttcatatttcctccttggttcgctgtaagcgcgaaaagaccgcttagcgcacatctttacctgaatttttctttgtccaatatatcacactatctctattttttcaaataaactgataaatatttcgttattattaagaagatatcaatatacataactactgaaggatttccacaccgttacccacgtcccccacttcacccacagggttgtcgcggatgtccagatactccagaaattccgcctgtttcagaggggccaggtccgttatataattgtccttaaggctgagtcttttaaggttcttaagacctgcggcaaaattcagatccgccagctcgttgctgtccaggtacagttcctccagattagggaagcgggacaggatatccatatgttcccccaacttcacatcatcataccacacactggtcattccgccgtaggattctacataataattcttgtgaagctccatatttctgaggcccagcacccgcaggctgggattttcctttatcttgtcaaagtttatctcaaatttaccgttatccagatacaattcctccaggccctggtggttaaaaatggaactcacatccccatacacctccaccaggtagttatagccactccagcccgttccgtccagattaccggtgaagtcagcatatttaagtcctgtcatgcctttgaggaagtccaggtttctcaaattcccctgggaattccatacagagtaaaatgtaagccgttccaccccggtcagggatgagagggcgtccgcctggtccacattgcagttgtgtatggaaagctccttcagactgctaagccccctgatagaggaaatggacataaagcccttgatttccagcctttccaggccggagagggatgacaggtccgggtccggctgggacgtcatcttatcaatgcttaaggacgtcagccctggggctgttcccaccggtccgaaatcctgcaccttgttatttcccaatagcgtcagggagcgcagagcgggcacctctgacagggaagccaggctgatgacagcagtatcctctaacgtaaggtcctccaatgcaggaagtcccttgataaagccgatgtccttaatgatatccgaattcaggtacagggatttaagaccgcccatcaccgagatggcagagtaatccttcacccttatcttatccttgtccgtgctgataatggaatcagagtccaccgtgtcttccagtgacaggtaattaagactctttaacggcaccagctgctttaagttggtgtcgggataatcccggacagtcaggcgttccagattctcaaaggatgcgattccctccatagaggtaattcccttaagctgcagctctgtaatctgtgccgggtcgtccagcatatcctttatgccggaaatttccacatttcccgctgtgatgcccttaagttccttaagcccctttaaagtgcggaccctggacagccctgaccccaaatccagtttcaccagtcctgtaaaagccgccgcgtcctggggctcccagtccatggccccaaaggaggccgtctgcaccaccggctccttttcgctgtaagggtcgtcgaagctgtaccatacccggtctgtttccagggatgtctccactttaagatacctgactccggccaggtcctccgggctgatttccgacggttccttttggaacatctcccatgtcatggcatgaaacaggggcgaatctgcctttggagccgtttccccctcccggacttcctcccctgcttccccttccttccccaagtatccggccgggcgggtgtaggcgggaattgacggcggagcggtccgcggcccggaggaagaaccggaaccagaggacaggataaaagcagccagcagaacgcccgcgcaggccaagccagcaccaagggctattttggccccgtttccctggtctttgccggaaggggttgtctggtatatattgtaatttgtaatatgctggactttctcatcgtccagcaggaactggctcccgcagtattcgcatgttataagctttgtctgtgaatcctccaccttaagcttacccccgcaggaagggcattttatctctaccattttcataaacacttttcctctttgcctttgctggtaatcgcggtttcaaaccggaccgcttcgcggcctcatatgacactattataattcatttcaggcaggtatggcaagcagctttgcagtcttaccgcaacagcaagagagggacaacccgtgcagcaggtgatgtccctctctcgtttaccatttttttgttttttatacggttatgccgttctgccgttgaccgccttcatgaaccgccctgcaatctccagcggccgggtaatggccccgcccacaatgactgcccatgctcccatatccagcattttcacagcctcctccggcgtgtggacacggccttccccgatgacaggaatgggaagttcttccgaaagccgcctgaccagctcaaaatccggtccttccagcctgggggtgtaatccgtatatccgctcatggtggtgctcaccaggtcaattccgcttttccacgcctgaatcccctcctgataatcggagatatcggccatcagaatctgatccggatatttttctttgatggtcccaatgtattcccatgggctcagcccatccccacgcttcctgtctgtgcagtcaacggcaatgatgtcggcccctgcctccgccagggcgtccacctcccgcatagtgggagtgatatatccgtcatatccctcatacacctgcttgatcagaccgataacaggaagccctgtctccctcttgattcccaccacatcccgcaccgtgttggcgcgtatcatggggcttccggcctctctggccgccctggccatataaggcatcagggtacgctccgggtcatagagaggttccccgggcagggcctggcaggagatgatgagctttcctttgatacggttaaatagttctgttttgtccatttcgttccaatcctttccctccggctttcacggcctctcatcagccacagccaccttaaccacacattttttgatatcttcaggctgttccaggcatccgcccggcccatgagcctcccctgccatgcacagaataaacctgccgggccccataacgcagcgtccccctgctcctgcacaggctgccgccttctgaaaatccggccggtattccccaatgggagtcacaccgttaagggccgtctctatgacctcgcaaccgtctatatctatctggatatccatataatctctgtgcacttcataactctcatccgtcagctcatgggtcctggcctccatcacctgcagaaataccctgtccccgtcaatctccgtctttcccaaaggaagggtgtttatatccacagacatcagataatcaatggccttatccagattcctgttcatgcccctgtaatttcctatattagccagcaaatcgtatatcatatcagcagtatttctcctttgcggcttctatcatggcggctgcctccccggcaatggcccggtcgccatcgcataagtctgtcagcggttttcgcacgcctcctatatcaattcctctgctgacccgcagcacttcctttatcatggcatacatattacaggttcctgagcagagcttatatataatttcatccgcatcatactggatagccctggcctctgccatcctgttttctgataccagatcatatatctttaaaaacagttcgggcatggctccgtaggtgccgccgattcctccatccgcccccatggccagaccggacaccagctgttcgtcgggtccgttgaacacgataaaatcctcccgtgtcttcatggcctcggccttaaacatctggatgtcctggaccggcatggatgagttcttcacgcctgccacacgtccgtttaagagcattgtccttaaaagactcatggtcagggccgtaccggccagctggggtatgttatagataataaaatccgtatcaggcgctgcctctgatatatcattccagtacccggcagccgaatattccggaagcttaaaataaatgggcggtatggctgcaatcccgtccacacccagggactgggcatgggctgccagaatacggctgtcccttgtgttattgcaggcaacatgggcaatgaccgtgagacggcccgcggcctcgtccatcacagcctccagcgtctttttcctgtcctccacagactggtagatgcattctcccgaagacccgcccacatagacgcccttcactccctggtccacaaagtacctggtcaaggcccgcactccgtccccgcttacctctcccgccctgtcgtagcaggcgtaaaatgccgggatgattcccctgtatttgtcaagcttcattcttatttcacccccgttatctcagaaagttttaccttcctgttctcaaaccgtgacctggtgcaggcgtctgccgtggcaatggcgttcctggcagcctcccctgtaagcagggccttaaactcctcgtccggctgggcgccatgcatgatattgttgaaatactccatctcatcatacatgatgctgtgaagccacataggaggctttttcccgggtttgccgtacatgatggcgccgtccatctccgtgccgtgatagattctggtacggtcatcatcctcctcctgggttttgtgcataaggaaaggttcttccttatcccccttcttaagggttcctccgcagttgaacatatccaggcggatagcgccctctgttccctgaatcagcacataatgttccggccagtggaaggcggatccgtactccagtacagcgtatctgttatccccgtattccatggtgatgaacagcatatcgtcctcatccccaaactgctctccgcagtgggccacattgccgcccgccatggtcacttcctcggggcagccgcccataaggaactggatacagtccagctcatggatgtgatggtagaggtggcctcctgatttggcccttattttcttccagctgactgagggctgtatatcctcccagccattcctggccgagtggcagtacagcacctttcctatgactccgtcattaatcatcttcttggctgtgcgcacgcccttaaaaaagttcattacatggcctgccatgaaggtgacattgtgggcaacgcatgcctccaccatctccacgcagtcctgataggacagggcaatgggtttctcacagaatacgtgtaccccgtgctccgccgccttgatgaccggttccttgtgaaggtaattgggggatgccacaattaccgcgtccacgtcttcacggctgtatagccggtccaggtccgtctccgtgtcacagcccagctccgccgccactgtacctgcattctccgggtcatagacagccactaccctggccccctcctgctccttcatgatgcgggccagctccgccccaaaatatcccgttccaaccactgcatatccgattgtattcatgactgttctcctttaccgtccatatttttcacttcatgatttcgctgagttttaccttcctgtcttccttaagagacagggtgcaggcgtctgccgtagcaatggaattcctggcagcctcaccggtgagaaggggaaggaactcgtctgtaaccggggcgccgtgaagcacattgttcagaaactccatctcttcgtccatgatgccctgaagccacagaaagggctttcttcccggccttccgaactggttgccgttgtcccgctccgtctccctgtaaatccgggtcctgtcatcgtcctcctcttttgtgcggtgcaccaggaaatgttcttccttttcccctgtcttaagggtcatgccgcagctgcacatatcaatctttatggctcctctggttccctgtatcagcagatagtgctcctgccaccggaaagcggaaccatattccaggaccgcatagcgcctgcccggatattccatggtgataaacagcatatcatcctcatccccgaaccggtcgtccctgtgggcagcattgcctcctgccatggtcactgtttcaggacagccccccataaggaactggacgcagtccagctcatggatatggtggtacaggtgccctcctgatttggatcgcgtctttttccaggtttctgatgcaccggttccttcccatgcgttgcgtgccccgtggcagtagagaatgtccccgataacgccctgtccgatgagttcctttgcctttctcacgccacggaagaaattcatcacatgacctgccatgaataccacatggttttcccggcatgcatccaccatctcccggcagtcctcaaagcttaaggcgatgggcttttcgcagaacacatgaagtccatgctccgccgcggccagcaccggctccttgtgcagataattgggtgtggccacaatcaccgcctgtatatcctttctggataccaatgattccaggctgtcctctgcatcgcatcccagctctgccgccaccggacctccgttttcagggtcatagacagcccgtatctgggcccctggttttgtattcatgatgcgtgccagctccgccccgaaatagccggagcccaccacgccgtatccaatggttcccgttatagcttccataaaatataactccttttccctttctgttaaattcatcaggacttcacagcgccctccgacatgccgcctgcaatcttgttctgtatgaggcagaagaaaatgacagagggaagcaccaccagagcagatgctgccatcatgtctccccagtccagtatctcagctccgtccagggagcgcagggccaccgcaacagtcatcttgctggtattattcatcaaaatcaacgcatacagaaactcattccaggtgttgatgaaggtatagatggccgtggccaccacaccgggcgccaccaggggaagcaccacctggacaaaggtctgcattttattggccccgtcgattctggccgcctcctcgatttccaggggtacggtcctgaagaatccggtcagaagccacaccgcatagggcacggagaaggacaggtacacgataaccaggccaatccttgtgttaatcagtcccagctttcccatgaccacagagtagggaatggccagaaggatgggcgggaatatgtaagtggtcaccagcaccttggacatggctgatcccagccgcttaaagaacctgacgattccataggctgccagcgcagccaccgtaatggcaatcagggttgtcaccagggagatgataacgctgtttcttatattgacaaaaaacttaaggtcgttgataacatgggcgtaatagtcaaaggtccatgtctcaggccagaaggccgtgggatttcccgtcagttcacccttgcccttcagggaggatatgataatccataccagcgggaaaatggagataagggtcagaataatcaggtatatatggctgataacgtttcctgctttaaactttttcatttactgtcctccttttcccacttattgatgaccgcgaagtagatgccgcatataatcatcaggaatataaacagcagcacggtcactgccgatgaacgtccgatcagcttggtgctccatcccatattgtaggcgtagagcggtatggtctgggtggtgcccgccggtccgccgcccgtaatcaggtaaatcaggtcaaagttgttaaaaatccacacggtccttagaaccaccagcagtcccaccaccatcttgatatggggcactgtgacatagtagaaggactgccacggcctggccccgtctatctgggcggcctcgtactggtccttgggaactgtttccagagccgagagcacatttaccataatcatgggcgctccgaaccatatattaatcagcaccaggcttacaaaagccagcgtaccgctggtcagaaactggggcgcggcctcacagattcccagcttcaccaggatattcggcaggaagccgtacactccgttgagaatccatttccaggaaaatgcaatgacgatggagggaaatgcccagggaatgatgagaagggtcttgtaaacgcccttacacaccttaatccgcttcagggccagggcagcggtaaaacccactgctatctgtcccaccaaggacaggaccgtccatttcagggaattgaaaaatgaaagccagaagccgctgtcccttaacacctctgcataattcttaaagccaatgaatttataggccggcttaatcaggtttttgtttgtaaagctgtatacgatgctggaacagatgggatatatgaataatgcaattacaatgacgattgcaggaagtacaaacaaccaccttgtataacttttcttccccaagatttcctcctccttctcagtattagagcgtgtctcaaaaatgcatgcgctttttcagacacgctccgcgacaacctattcagctgtctcaaacagtgcgttcagtttatcttctgctgttttggcagcagtctttacatctgtcccgttggtaatgatatcctggaacatatcctcgatcacatggttgttctgcataataccggcctggacattaggaccgtgctcataaccaaatgcagtaccgatatcggctgccgctgtcagcacttcctctgcatgtgtaaactgcctgatggtgtcatcatccttgtatgcatctgtgtcagcgattcccttgatggcaggaagcatgcccaccggggttgcgtgcaggaattcaacgtatgtatcctcgtcataaagagttttcataaatgccttgcagatttcgggatgcttggaagccttccacacaaccataggcgtgtttgtggtcatgattccctcgtccgggtcatccgcgttgatttttggaatcggatagcagtccacatactggagcaggtccggcgagttggctgcaacacctgaaatctggaagccggagttaaaatcaaatgcggttttgccctggtaatacagggtagcctggtccagcacatcaaagttaatggaatccttaggcgaacagtcattgtataccttcagccagtagttgatgccgtcaatggccaggtcgctggtcaggttggctttcaggtcatcggtcagcaggctgcctccgccgcttctcacatagaaatccaggaaaaaggttgcctggaagtcatttgtcccgcatgggaaggacagtccgtagacgccgtcctttgtaagggccttggctgtgtcgtaaagctcgtcccaggtctttggaacctccagaccgtttttctccagcaggtccttcctgatccacatcacatgggcgtgtctgtaaaggggaacagaatagttattgccgtccatggtgccctcggatatggctgcctctgcgaatttgtcacggccgatgtcgtcaatcaggtcattgatgggcgtcagggcatctgcgttaatcatctccgcaacctgtgccggaagggcggtgctcatatcaggtacattgccggatgcaagcccggtggtccacttggtataaaagtcattccatgagaatgtctcaatattgattttcacatccgggttttcttccataaatttgtctgccgccttctgtatggtctccagtcttggcccctgggtaaatgaatgccagaacgtaatctcacctgaaagcgctccctctgttccgctgccgcttccgtcctggctccccgtatcctgtgtctgggactggcttcctgcttctttggaaccggaagcctctgtggatgaaccggaactgccgcatccggccaacagtgctgctgcaagtgctgccgcaagaataaagcttacatgactctttttcatatcatttctcctttttctgaattatttccgtccgtcattctgctgtttctataggtattatattgattttctttatgcatttcaacattctggacaacttataatagcacaaaacaaccactatactatttttttatccagttttggttttaagcaggcagggacctgtccccgtatctttgggagacaggaaaaggacagggccggaacctgattccggatacctgtccttttgtatctgatgtttcttatctctgctccctgcttcctattttcattctcctgctgtttccgtcacaatccattccttcttaatctgccacagggccgcctggacacttttggccccggattcctcccctgcccgaatctgctcatgatggcgaaacagcctgggccagctgcccatgattttctgtttcagctccggataaaaaccagtgagaaccgcgtccatctccctgaccccccgctgctttaaatacgcctggaaagccagctcatccgcctcatcttcacccaggtatttaaggcacagaatcttattccagtcatacatgtcaaaaaacacagcctcatccctgggaacacagagcgtcagtgtcctggttccggccgactggtccaggctgtacaggttcataaaggaccaatagggaaattccgccccctcaggtttgggaaccagcttcgctgcctccttcacgaaccatctgtagacagtcaggaaaatagggccgctttccccatattttctgcgcacatactcctcacgtgaaaaacagcggccgtccctctctatggcctttaatacagcatctgcctgtgccgcgtataaaatcaccttatcacctgtgtcacccattcttttcttatctcccatatatttccatattttgagtcattccctaaaatcacactgtcatcaaaaagccggtcccagctggcaataatttccctcttaagatggggatagaactgggacatgtatgccttggcatcgcttaccccgtactgctccatcatatcctgatggcgtctggcatccgccttatcctttggtatgtaggagtaattgaggatgcttccccatttttctatattgacagaggtaatacggtccggttccagggtcagctccagtataacggcgcccggactgggaagcatgaccgcctcactggtaaatgaaacccataccggatactccacatccccgggcttcctggccgcgtccggactgtgccttaccagccagtcatatacctccagcaccagtcccgcatgctcctgcaggtcactgcggatatattcccgcctggcaatgtacctgccattttcattcagctccttcagcacattttcatgctgctttgtccataccttgatttgttccatcccgccatccatcctctctctattgttttgtcacccctactcctgcgacatcttcctgtaccgtcccggcgtcatcccaaacgcctgcctgaatacccgtgtaaaatggttggcatcctcgaaccccacatcgtgggcaatacagttcacaggatcattggaaaccagcagaagcctggctgccgtggtcagacgcacctggcgtataaactctgtggcggtcttccctgtggcctccttaaacagacgcctgaaagtagtctcagccacttctgccataccgcttaatttatctgaggtatattcctctgtgggatttaacatgatataatcaataacggtctgtatcctggggtctgtctgcaccgtggatttcttcaccctttttcgtatctgctccaggttgtactccaggccgttgatctccgccttcacatcatccggctcatcggagttcagaatgtcaatcagactggcgatcagagtgtcaagggctcctcttacgtgaaaggattttgactttttgtccgtgcgcacccacttatagatatcgctgaaataaggttcgattccctcccccacatccatcaccaggggaaagttatagtactccctgaggaaattggccccctcgtagaacacggatgtggtaaaacggatgctgtaaaacgcaaacgtatcctccagcgccttacatgacagccagcagccctccggtatataggacacctgtcccttcctcacaatgaccgtctccccgtctaccacaaactcagcgcttccgtcaatgatatagcgcagcatattgtacggtatggcgctctccggatacgtccaggtacgtccgaaggagtatttatctatatacagaaaattaaaccggatggtattcatgaatgaggaaagcgactgcatgatgtgcaccccccttttacagtattgccttattacttccggcccaccggcacttccggtttcgtaatcttaatctgcccgccgtccggacctttatattttgattgtatcaaatcacgcccccaatagccagacccttgacagaaaattttatacgatgggattttatacgcatatttgtccacacaggccgccgcattcccttcctgcctctttccggctgtttgcctctcaccgcccgattcccagctgtttaatcagctgttcaatcccctcaggactgtccgcatatgttttcaccggcgccccaaccatttcaccgcactcctcctccgtaatggtgccatggcgcaggacagacccctgttccagctccacggtgtagttccagctgacctgtcccaggttatcggtcagggcaatgagcacacaggcatatgctttcatccgctcctcaaacacagctgaattggacgtgctctcctcaaagttaagcgtccagccatagggctcaccggaggtctggagctcattcttaaagcttcccaattctcttgatattcccaatgtgcctgagagccttccgtctgccgaggcatcgcctatatacggattcctggccctgtacagttcattggccaggctgctgatcaggtctccgttactcttaatcgtaataccctggatattcaaatccattccaccgccgggaagcgccagttccaggttaaatgtgccgcttctgttccagaatgacggcagacaggaatagatgaccagcctctttgccccgtcctcctgcaccagcttatatcccctgtaaacagcggctgaatctgccatgactcctcccacattcacctgttccccattgacatcggtgtaggtgagcacatatgactccgtgggatatcctattacaaacagcttcataaaaagtgctgccgccataaacaggaacacccctgccgccgccagaaccacgttccttacattctttcttcttacctttttcagataatcaatttccggcggttctcctgctgtttgggaagcatccccttccatctctgccctcatccgctcatacatttccctgcaggtctcacattcctccagatggctgcggatttcccggtccgttgtttcagacgtcaggccgtccgcatacataggcattaaatcctgaataatctcacatggtattctgtggttcatagttttcctgcctccttcacgactctctctttcccgcggtaataggtcacccttgcccagttctcgctgcgccccatgatttccccaatctgcccgaaggtaaggtttcccaccagcctgaggtacataacctccctcatagggtcctccaggccgtgaaccagcttcagtatctgcacattgtcccatagacaaagggcccgggactctgcggattccacagatacctgttcagcctcatccaggggcacatggtctttctgccttcgcagataatcacgccacagattcttggcaattgcgcagagccaggtggatatgctgctttctcccttatacccgccgatgtgtttcacagcctggtaaaaggtctcctgggtcagttcctctgccaggccggggtcccgggtcctggttaagagaaaaccatatatcatttttccgtgtttcatataaatttcttccatggaatccatatacgcatttcctccttctgttaattagtgtcccgtacccaggattcgttacagaaaaataataataaaacagacccggccagaaccaggaatataatatcccggatatctggctgggtcctgattgctttgagcccattgccccgtttttatgttctgaagccctattgaggatttttctctcaggccttgggtatatccagtgtctgtccctcatatatcaggttcggattcttcactgagccggaattaagctggtaaataagctcccatttcagaggatctcccagggctgctgtggtttttgcaaaactggaatgcctcgctgggggaagatggtttctccacgtcaatctgatagtagagcggctcaaatattgctccgtccacccgcacttcctcttggctgtcatccaccagaaacagacactaaacagcctcgttcatccttgccagctttgcagcctggtcggctgcgatgtacatacgttagtttaattttaagggtgtacgtgcatggctttagaccgattaaggctcgacacatgcgttgctttgctaacacggtgtacacatacgtggctataaggtataagagtatatacgtatgcagctttaaaataatcaaataaatgctggaatctgtacttgatatccctgtcctatatcaataacctgaatattttgtctctctattaattcatttaaattatttatagccttttctgccacagcaagtgcaatatccgcatttttatctgctacattctgacgttcaaatctaactgaattatatggagatttttgatctggttttttatggatagttgaattcaatttcttgatatcaatagcctcaagaatatttattccagcctttttctgttctcgctgtacccaagagttattatgagttgtctccaactttttatgtaaatcttgatcctgagtcattttcccaaactcatctgcatatgtaactgacttctgggctttctcaactgtctccatacagccttgaataacctttctattaatagcttttataatcttcctatcattttcacaggtaatttccatctcctgtgacttattccttaatattctagcagaaatcaactcctcttccgccaattctctttgttctatggaattctcattctcaaagttcaaaacatctgcttttatctcaacttgatgttgaatactttgtttattctcataaggaaacatgagcttttgtaaaaatatcatctgacaactgatatctacgttattcaaatcacctatatcatagcacacttccatgaagtcaaagtttttccgctacctgtcgtgtgccagacaaatccacctctttctgtacttaaggctctatccattaccgcttcagtagcataaatttgataaggtcgcataataatcagatttttatccgactcagttaaaatcatatacttataaatcatttttgtaactctattaacactcaaaaaatcgactgagaactcatccagattattaatcctcttatttttctcgtctgtccaataaaaggtcaacgatttcataattcttgcgtcatctgtatttgaaaagtatctagtctcaacagaatttgaaacaacataaaactgcacaaaatgaaataatcccttataactatgtatacggtaacggtcaatctgattaattgcttctttgatatcaatacctgcacgttttaactcaatttgtacaatcggtattccattcgcaagcaatgttacatcatatctatttttatattttccaacaacagtgacttggtttgtaacctgccagatatttctttcagggtatttactaaaaaaatccaaatatacagtacttccgtcctctctatccaaaacaaactgatctcttaactgttttgcacattgaaacacagtcttgcctgttaatcctgtcatcaaacgttcaaattcgacatctgtcatatccaaaccattcaacttatcccgattaaacctattcatctgcttacgaaagtttaataatagtgtatcataatcttttatcttaactggcttaaatccctgagcacctaatttattaatcaaattattttccaattcagcttcactctggtatcccattaacttctctcctcttcctgtaaagataatattttaataaatatcggtaaaaagtcgcctctataattccacataccttcatccatatgtaattacctaatctccattatagcaaattattttaccaaagtacaaaacaaaattttgctgtcataaaaactgtaattttacaatacagaactctaccaatctccacacaggcgcgtcagtgtgtcttagcctaaaagcaggggctatcaaactagctattacaaatttgtgacgctataaaactagcaaaacgagaatttcaggttagtcagtgcgtctataaaccggataaacgtaaaaatcgctccattttcttccaaaatggagcgataacacacgtcaatattctcttcaaaaccaatccgaaaaagccgcaaatttcccaaaaatcccgtaaaatcaaggggttttacatctcgtcatttaacctacttaagcgcatcgcctggtctgccgcaatcagattatccaatagctcctgaatatccccgttcataatagaatcaatcttatacagtgtcagcttgattctgtggtccgtcacgcggccctgagggaagttgtaggtacgtatcttctcagagcggtcgccggtaccgatctggctgcggcgttcctctgcctctgagctctggcgtttttccagctcaatgtcgtacagcttggaacgcagcaggcggaatgccttttccttgttctgaagctgggatttctctgtctggctgtaaataacgattcccgtaggcatatgggtcagacgaaccgcggagtctgttgtgttgacgcactgtccgccgttgcccgatgcgcgcataacgtcgatacggcagtcgttcatatcaatctgcacgtccacttcctcggcctcaggcataacggccacagtggcagtggatgtatggatgcggccgccggattctgtctcaggcacacgctggacgcggtgtacgccgctctcatatttaagcttggagtacgcgcccttgcccgtaaccatggcaaccacttccttgaaaccgccgatgccgttttcattaaggctgacaatctccaccttccatctctggctgtccgcatagtttgaatacatgcggtaaagttcggccgcaaacagagctgcctcgtctccgcctgcgcctgcccggatttccagaatgatgttcttgtcatcgttagggtcctttggaagcaggagaatcttaagttcatgctccaggtcctcaatccgctttctggcatcggacagctcttccttggccatctcccgcatctcctcgtcgttctcttcctccagaagggccaggctgtcctccacatcctgctttgcctgcttgtactgcttataggcctccacaataggagccaggtcagcctgctccttcatgagcctggtaaaacgcttggtatcctgggtcacatccgggtcacccagcataagcatcagttcttcataatgaatcaacatatcatccagcttatcaaacatatctatctcctgctcctgcgattattccaattccaaccactacattaacctgttacctgtgtttctcccggtccggcatcccggtccgcgccagccgggcgtttatgtctaagcgtttatgtccgccctctcacccccggcctcaccgcctggccctcaccacccggtcctgtcctgccagatcctgaaatgtcctcacatccctgtatcccccggaccggaacaatccttccactgcctctgactggtcatatccaatctccatatagatacttccgccctccgccagatgattccgggcctcttctgccaggattcgataaaaggtcagcccgtcatcacttccgtccagggcaatcctgggctcatggtcccttacctccggagcaaggccctctatgacccggctggggatataaggcgggtttgagacaatgacatcaaaggtcctgtccgtctccagagcgctgaacatattgctctcaaacaattcaaatccgccctcgtatccgcccaaaagcctgtcacggtttccggctgccaccttaagggcctcggccgacacatccagggcagccacatgacggtatctgcccatgagcgccaggctgatggcaatgcacccggaaccggtgcacatgtccagtacgcgtttttccctgtcattctgttcctccaggaccagctccaccagtgtctccgtgtcctgccttggtatcagcacatgttcatttacaaggaactcaaatcccatgaactcctgggtcccggtcaggtgctggagaggggtccggcctgccctggcttctatgagcctcataaattcccggcattttccctctgtctcctcatccttccccagctccctggccttcagggccagaaaagacgccagattcagatgaaatacctccagaagcagatacctggcatccagctgcggatccggcaccccggccttattcagttcctgaacaccctgccacaacagctgctgcatggtcatgttttactgctccttcactgtcattgcctttaccatttctgctgactttatcattttcactgctttcatcatttccatttccgccatcatagtgcctgcttttctgccatcccggaaaattctcatccagataagcccgccagtcaaacactgtctccactgccgcgatagccacctctatcatgctgtcatccggctccgtggttgtcagtccctgcatccacatgccgggacggctgagcacattcaccagccgtgagtcatggcgtcccgcaaaacgcaggaactcataggacacgcccgcgatcacaggtatcagcacaatccggctcaccacacgcagccagaccgtatccacccgtatcaccataaaaaacaggatgctgataaccatgacaatcataataaagctggtaccgcaccgtttatgctccttggaacttgcccttacattgtccactgtaagctccagcccgtgctcgatacagttgatgcacttatgctctgaaccgtggtacataaaggtcctcctgatatcctccatacgggataccagcttgatataggctatgaaaatgacgattcgtattacgccctccagtatggccatcactgtgtcggaatggatgaatcctctgcatatattggcgataaacaggggaagcaccatgaaaatgccaattgccataacaaaggaaaataccataaccactgtcatgagcgcgctctccagcttctcgccgaaaaccttatccagccacgcctcaaatttaccgggctctgcctcctcgtcgtcctcaaaaaaactgcaggaccaggtgagggccctcatgcccactaccatggaatctataaaactgaaaatacctcttacaaagggaagacctaatactttatgcttcttggtcatactcaaataggtatcctttttcacctcaatatccccgtccggcttgcggaccgcaatggcgtagtcattgccgttctgcatcatgatgccctcgattacggcctgaccaccaattcctgaatatttcattcctttaacctttctgctgtacgaaaaagaaaccctctttccatgatttcccatgaattcagaaagggctgagcctgctcccaagctcaaccctcatctctttgcttattagttagcattcatgccatatttacgattgaacttatcaatacgtccacgagcctgagcagccttctgctgtccggtgtagaatgaatggcacttggaacaaacctcaacgtggatgtcctgctttgttgaacctgttacgaactcattaccacagttgcagacaacctttgcctggtaatagcttggatggattccttctttcatgattttcacctctctgatattatttgcggtttccgaccgcggcctgtgtatgccaatctgtctctgtacattacaggcagccggccgtatgccgtcaccagaacgcgcagatatcagcaataactaagttaaacgcgtcctcaccgtaaggttctgactcacgcgaacgctaaaactgccgtcaattcagacagcttacatagtatatcatagaaccccgggacttgcaagatatttttttgaaaatgtggacaaatatctagctggatatggggtcaggatatagggttacttccagcactccggaagctcaggttcccgtaccctcaccggctcaggataaatctcaccatgcagttccagctccacccgctcaataatttccggcttcaccggacggttgacctccacaccttctatggggaaatccgtcacaggcactgtctctaccttttccagcctgtataactcatccatgccctccagaacacggccgaacacaggataaatgcccttgtggtccggacagtccctgagggggaagaaaaactcgcagcctgccagtcctgcctcaccgtagccgcccatgcacacggctccgggatgggagtccaggggtaccacgtccgggttcagttcaaactcattaggaatcagataccggcattccctctttccaaaggccgtgtagctgacatccacccagtttcccggcacaatccgctcaatggcatggtggtccaggtatcccctggaggctgtatagataaagctgttcactgtattgggcgctgactccggcaaaagctctatgacaatgttcctgccgttggccatatgtaatgttgcgattggattcatatatcctcctatataacctctgttagccggttacggatgaaccgattatctcaaattccttggaatagtggttgagcacctcgcatccatcctctgtcaccagcaccagatcctccacacggacgccggtatccccgggcagatagattcccggttcaatggaaaatatcattcccggctccgctttctgggtattcacagaggacacgtctccgaactcatgctctcccagaccgatgaaatgccccagcctgtgggtaaagaaaggtccgtatccctgttcagcgatcaggtccctggccgccccgtccagctcgcacagaggtacgccgggacgtatctttgagatagctgtctcattggcgctgcggacaatctcataaatacggcggtgctcgtcactggctttgcggaagtaaaaggtacgggtcatatcggaacagtacccgtccttgatgcagcccacgtcaaaaagcactgaatcacccggctttataacggtgccgtccggtccatgatgagggtccgccgcgttggctccaaaggccaccagcggttcaaaggaaaaaccgtccgcccccaggtccatatatatcttaagcatctggtctgcaacctgacgctccgtgacgccttcatgaatcagcgttttgaacactgccatggccttatcattgatgtcagaggcagtgcgcatcttatcctgctcctcctcatccttaacaccccttgtcctgtccacggcaatggaggaatttacaaaaccggcagcagcctccatctccataaggggcagcagaaaccgggcctttaaatccttatcaacgcccagcgggctctccttatccagatagcctgccacgatttccgccgccgggtctgtatccgaataccacaccttctccacgcccacatcctcaggcacggtaaacagtttattcagaaaatacacatgtttcccgtcctccctcaggtaaagggcataaaaccgttcaaatggctccacatacacgcctgtgagatagtaaatggacatggggtccacaatcagcatctgtctcagccccatttccttcagggcttccatgatacgctccgctctcttctgcttcatgataatatcctcctcttctaaaactgctttctcagcttggggtccagcaaatcccgaagaccgtcgccgataaaattagcgcctacagccattgtaaagatcgccagtcccggaaagccggccacccagaacttattgaaatagtcagctccatccgagaccatcataccccactccggcgttggcggcgcagagcccagtcccagaaagcttaaggtggagaacatcagaatctggtttccgatgtccgtggtagccataatcagaaccgaactgatgctgttgggtatgacctccttcatcaggatccggattctggaggcgcccagaacctcggaagccgccacatattcattttcctttacactcagcaccacgctgcgcatcatacgggcataggtgggccatgccaccacaatcagggcaaacatggtgttaaacaggttggaacccataaccgcattgataatcattgccaggatcagggaggggaaggacaaaatcatctctgaaaaacgcatcatcacattgtccacccagccgcccacatagcctgctacggctccataaaatgtaccaataaaacctgctatgactacggtaaggcagcctgccagcagggaataccttcctccgtagagcacacggctgaaaatgtcccttccaaaattgtccgtgccaaaccagtgctctgaggacggagcctttaaccgctgtcccaggtcctggacaatcgggtcatagggagccagcgccggcgccagaatagctgccgcaatccatgccagacagataattacgcccagcgtaaacaggtaattggatttaaataaccgctttatagactgtaccatcagctgcacctcactctcgggtcaatgattccgtataatatatccaccactgtattgatgaccatataattcagtgcaatcagcagggccaccccgatgatggacgggaaatccacagaaagcacggactcataggcaaactgccccacacccggccagttgaaaatggtttccaccagcaccatgccgcctaacaggttgcccaggcccagaccgatgacagtgagcacaggaatcagggcgtttcccagggcgtggcggataatcagtcccggccttgacaggcccttggcctttgccgtacggatatagtctgtagacataacgtccagaagattggagcgggctgtcctggtaatcagtcccatggtaaaggccgcaagcacggttcccggaagaatcagatggctggcagcgtccagtgccttggggatatttccctccagcagactgtcaatgacatacatgcccgtaaccgtggccggcgccgtaaaggcgttgctcaggcggcccggacccggaaacagtttcagcttgtaatagaagaaatataataccagcagggcaaaccagaagctgggaatgcttacgcctgtaacggatatggcccggaccgtctggtccaggatgctgttgcgccggatggcggatataatgccgaacagcacccctaaaatggcggcaatcacaatggcaaacaaagccagttcaatggtggccgggtaacacctggccagctccgacagcaccggtttgtttgtgcgcatggaagttcccaggtcaaactgtaaaagattcttcatgtacaggatatactgcacgggcaggggctggtccaggccgtattttgcccggtaggcagccacaatctcaggatcatttaaggctctctggctcaagttagccacggtggggtctcccggtatcattttcgtcagtatgaaaaccagggtggcgacaccaaacagcatgactaccagatacaccagtctttttcctataaatttcagctgttccatacgatacctctcttttcttatgtttcaatccatacttatataaaattaaattttatgttgtattccagtctcatacagatattcccgtcaacggtatcccctccgggatggacgttcacggcaatacctgctgccgcttaaacttctgacctgaccgggccggggccggcgccagacagcactgtttacggagcctgcgggcaggaagatatctgcctgcccgcaaaacagttccgtatataacattattacttcacgttaatcagagtcagatccagggcataggggtctgatatggccactccctccagcctggtgttatagccgatatgggacggagcctgcgccaccataatgaagggcccatgctcgtacattgcatcctggatttcctccagaacagcgatacgcgcgtcattgtccgttgcagacatggttttttcatacatggctgccagctccggatccatgtcggcgctccatccggccctctttccaaccactccgcccggaaggaattccagctgcacattggggtcgttataatcggttccccagtacataaccgtaaagcccagggttccgtcgcggtaagcatcgccgtatcctgctgcccatggctgtgaaacaatatttacattgattcccacctgtgacaggtcatccttaatcttctgggccaggtctgtcaggagaattccctccatatccaggtctgtcacagtcaggtccacatcaaatccgtccgggtatcctgcctctgccagcaacgcctttgcttcctccagatttgtatagtcagcaggcctctcgcccttgcttcccatgaaacccacctggatgatatcataaggagtgatggtgccgcttccgcagatagtctggataccggtgtaatccagggccttgcggatggcattctggacctgggggttggacacagggccgccataggcttcatccatgttcatcatcacaaatccaactgtcttggttgctccgttgataatggaaatattctcagcgccttccagctcggacatggtgtcgtctgtcatgttcatggccacatcaatatccccgccggacaatgtcatcatctgtgtgttggcatcaggctgtatcttaataatgaacttgtcaacattagtggcttctccccagtaattgggattcttttccagaacaacttcctggtccggaatatagctggtcatcacatacatgccggaacccgcgctggccgtatccagataagactgggctgtatcggcggatgacgcgtcctctgcgtccgtgccgccgtgctccttcacaaccgcgctgtccagaacagccgtggagctgtaggtcagcttggacagaatagcgctgtcaggctgggtcagatggaacaccaccgtgtaatcgtcaggggcttccatgctctcaatggtatcgcagataaaggatgggtttccctgaaggtttttgcagcggttgatgctgaaaagaacatccgcgctggtcatagaattgccgctggcaaatgtcacatcctgtttcagcttaacggtcagtgtgagaccgtcctctgaaaattcataggtatcggccagacaaggctccggcgcgctgtcattgctgtagaacttaaacaggttctcgtaacaggcattgacaatgagaggcggatacttctcatatacataccctgggtccagggtggaaaatccggagcccatagctaccacaaccgtattggaaccggctgcctgtgaagccccctcagtggcggtgtctgtcttgccggccgttgtgccgtctgcgccattgcctccgcatgcgcttaaggcaaatgaaactgcaaggcacagagccgcagtcaataacttctttttcataatagacctcctctaggtttattgagatgccagtgttctggcagtgtctccatattacaatcttttactggttccgtgtttcctcaggccggtgtcttcagaccaggatcttcaggccggtgaagccctaatacaggtggcaggccacaaaatgcccttcagccacttcctttaaccggggcacttcctggcggcacctgtcgcaggccttgggacagcgtgtatggaaccggcagcctgagggcggatccgacggactgggaacctccccctccagatggatccgctctgttttcacaccctggtccacctggggaatggctgataacagcgcctccgtatacgggtgataacgcttttcatacagcttatcataatcagcaatctccaccatattaccaagatacatgacccccacccggtcgctgacctggtagaccacgttcagattatgggaaatgaagaaataggtcagtcccagcttttcctttaactcctggagcaggttcagcacctgggcctgaaccgatacatccagcgcggatactgcctcatcgcagataatgatatccggctccagagccagcgccctggctatgccgatacgctgcttctgtcctcctgacagctcatggggatacctgctcagacagtacaaatccagtcccaccaggttaaggagcttcataatgcgggcctccacatccatcttccccttcatcccgtgtatctcaaagggttccatcagaatctggcgaacggtacgcctgggattcaggcaggcagaggggtcctggaatataatctggaccttcctgcgcattttctttaaatctactccctttagccctgctatgtccgttccgcccatataaatgtggccctccgttggtttcaagaggcggacaagggccctgcccagggtactcttgccgcagccgctctcacccaccacgccaaaggtctcacccttcatgatgtggaagcttacgtcgtccaccgcctttacggtcccggacttcttatcctttcccttaaaatatacctttacatggtcggccttaaccagcatttccctattgctcttgtcttcatttatactttcgtttatgtctctgttcggattctgtgccatacattaagcctccttccccgcagcctggtcttcaaacagccagcagcggaccttccgctcctctgaaagctgcttcatgggcggactgactgtcctgcaccgctctgtggcatgaggacacctgggccagaagctgcaccccttgatccgctccgtggggttgggcaccatcccctctatggtggacaatggcttcctgtcctttgtgatgacaggtatggcattcagcagcccaatggtatatggatgcttgggatcccggaacagttccccggccggcgcctgctccacgatatggcccgtatacatgacaatgaccgtatcgcacagctcgctcaccactcccaaatcatgggtaatgaacaaaaccgaggagtgaagctcctcgttcatctcgcgaatcaaatccagaatctgggcctggatggtcacatccagagccgttgtgggctcatccgcaatcagtatctggggctggcaggccaatgccatggcaatcatcacacgctgcctcatacctcccgacatctgatggggatactcatgggcccttacctcaggattggcgattcccactgctttcatcatgcggatggcttcctccatggcttcctttttcttcatgccccggtgcagacgcagggattccgcaatctgtttaccgcacttgataatgggatttaaggaggtcattggttcctggaaaatcatggaaatttcatttcccctgattttctgcatatcgcgctcagaggtcttcaccaaatcccttccaaggtataaaatctcccctcctgtgatctgtcccggagggttgggaatcagctgcatcattcccagagaagaaacactcttgccgcttccgctctctcctacgatacccagcttttcacccttatgtaatacatagctcagatggtccaccgcctgaacagtgccctctgctgtcctgaattccacacataaatcttttacttccaatatgatatctgtctgtgtcattttatccgccctttgttttattgcatcaaagcgtcaatgcggtgccaatgtattcacccgcagttttctgcatatatactcaaaacgataccacattttcggggataattcaatatatagattgacctgttttgcccggaaacaggtcaaaaccagcatagaaacgcataaacaggacgctgccaaggctgttttaacagcttatttacagcgtcctgctcttatgctctgttatttcttactcttcacatcccaaggtttcttccaataaatggcatccacattacattctttcatacattcgccgcactgtatgcattccctgtctcccacctgtctgacatccattttacaggtgcgcacacagcgcccgcagtcaacgcaggtatccctgtcaatcctcacccccagcaaagccacaggggtaaacagggaatagatggcccccagaggacagaggatgcggcaaaagcttctgtacagaaaacaggcgcttaccagtatgactgccagcacaagaaccttccagtgaaagagggcccctgccagaccgctcagggaatcgtccagaagcaccaggggaattcctccctccagtgtccccgcgggacatatgtacttacaaaaggcaggaacaggaaggccggaggctgccttaaataccaccggcagtataatgacaaacactgccaggatcacatatttcaccttggacagctcctgtgtgacacggttcttttttatcttgggaacaggtatcctgtagagaagctcctgcaccaggccaaagggacagaggaaaccgcatatggtccttcccatggtaaccccaaagagcaggagaactcccaatatatagaagggaagcttcctgtccatggcggacagggcattctgcagggtacctaaaggacaggatccgacggctcccgggcatgaatagcagttcagtccgggaacacacagtccttttgaccttcccttatagatggacgcctccgcaaatcccttcaggttcagattatataataatgccgcacaaagctgtatcaaacgccgtttcattgctgctgccctctcatggtcatagtcttctgccgctgccctcttatccgattccgatgcattccaggcacaccctcactgccttgcggaaggcatcctggtaacctccctgggcggctccggtgcacaggaatactatgccaagaacaagaaggataaccgccaccttattctgtctgcaccaatccatcatatatcaacgctccctgtcttacaccccaagggcttccttatatctctcatacatcgtgtccgcatccagggcaccggtggatatatgggtcaccctgccctccgcgtccaccaccactgtataaggaatggaattcgtgggatacagcatggatatggaatactcctcatccagcactaccgggaaggtgtatccattctcctccacaaaatccttcactgtcccggcatcatccccgcagttcaccgcgataataccgattttgtccccaaaatcatccttcaggcgctcaaaggccggcatctccttgacgcatggaccgcaccaggttgcccagaaattgatgataacaggctttccctgcagttcagacagcgtaatactggtgccgtcaataagctcccctgtaaaatcaggagcttgaacaccctccttaataggcatgcccggcttgaactcaatcacgccgtccccctggtcagctgctgcctctgcatctgcctggctgccgtctggggacggctcccggcctgcttcaccggcttctcctccttcccgggtcttttccggcccggattcattgttccctgtatccttcggcttgtcagttcccgtgccgtttttctcagtttctgcgctgctttcctcagccgccgtgccttccttttcagtcccctgggcctgctccgttttccggtctgccttattctggtctgccgtctggctgcatcccgttatctgcaaggccaggaaaatggccagcgccgcgcctgcagcactccttttcacggcctttttatttctgtaaaaatgttctctcctcatgtgttattcctcccttttcaactattggaatagacaaagaaacccagagaataccacttgtgccattctctgggttttactctaacataattattattttctgtccacccggctttatggggtttgtatgaaagttttattaagctttcatgaagatgcctgctacacctcatctaccacgggaaccacttcccgctcgctgtagtggtgtgcttcctcaagcatcatatcctttaccttcataagccttgtctgggagcttcgctcattctcatccagcttcatggtgatatagcggatgtttgactgggtatcgggaatcatcacatgctccagcgcgtttacacggcggcgggtcttttcaatctccgctgccatgagctggcaggatttttcgcactcagccagacgcagcatgtcaggcagtaaatctgccagactctttaccgcatcatccaggtcactggaagtaaatgcaaagccgtaggaatagatgtcgttagggtctgaagtcctggtcttatacttgaacacaggaatctccacactcatgacgttttttgtctcagtttccagatagacctcctgcttgggagccatcagggctacgttcagggcctcatctgtcatgccggaacgtgccagcacgaaattctggttagccgcagcgatgcctgcctccaccttctcgcggagggccttgttctcacgcaccaggtccaggaactgacgcatcaattcatcccgcttgtctttcagaagcttgtgcccgcgaatggctgttgccagctttttcttaaggcgggtaagctccatacgggtgggatttacatgttttgcacccatgttatgtcaacttcctttctgccggccggaaacctgggcgcgcatccataccgcacatggcggcggggctgcacaccctggctgtccctgccgggctgtgactgccagttattttgcttcgtaatacaaatcaaggaatttgtccttaatacgtttcagctcgctccttgggaggatgcgcagaagcttccagccgatttccatggtctcttcgatatcacggtcagcatagtagccctgggatacatactccttctcgaactcgtcagcaaacttggcatacagcttatccatatctgtcagggctgcctcgcccagaatgatcatcagttcctttgcgtccttgccgcgggcataggctgcaaagagctggttcatgacatctgcgtggtctgcgcgtgtcttgccttcaccgatacccttatccttaagacgggacagggatggcagtacatcaataggaggtgttacattcttacggtacagctcacggctcaggataatctgtccctctgtgatgtagcctgtaaggtcaggaatcggatgggtcttatcatcctcaggcatggtaagaatcggaatcatggtgatggagccgttcttgcccttctgacgtccggctctctcatacagggaagccaggtcagtgtacatatatcccggataaccgcggcggcccggaacttccttacgggctgcggaaatctcacgcagagagtctgcgtagttggtaatatcagtcaggataaccagtacgtgcatgtttttttcaaatgccaggtactctgctgctgtcagagccatacgcggagttgcgatacgctctacggcagggtcgttagccaggttgatgaacataacgcttcggtcgatagcgcctgtctcgcggaagctctccatgaagaagtttgcctcctcaaaggtaatacccatggctgcaaacacaacggcgaaggactcgtcggtgccgcgcacctttgcctgacgtgcaatctgggcagccaggttggcgtgcggaagaccggatgccgagaaaataggcagcttctggccgcggaccagggtgttcagaccatctatggcggaaacgccggtctggataaactcctcaggatagcttctggctgccgggttcataggcaggccgttgatatccatacgcttctcaggcaggatgtcgggaccgccgtcaatgggcttgcccatgccgtcaaacatacggctgagcatatcctcagacacgcctaactccatggtacgtcctaagaaacgcaccttactggaatccaggttgatacctgtagacgcctcgtacagctgtaccatggcattgccgccgtctatctccaataccttgcagcggcgtctctcgccgttaaccagctcgatttctcccatctcatcataggttactccctgtacgccgcggaccagcataataggacctgctacctcttcaattgttctatattccttgggcattagaagtcctcctttctgctcagctcactgttaatctctgactccagggtcttgatgacatcctcgtaaaccttatccaggtcagcttcctctgtatatttgaaacggccgatagcctcgcgcacaggaaggcctacaagacgctcgatattcacgccctgtgccagagcctcccctgccttgtcatagtatgccagcatcagcatcatcatcatgtgctgcttcttcaaggacgtaaatgtatcaatctcatggaaagcgttctggtgaaggaagtcctcacggatggaacgggctgcttccagtttcaggcggtcaggtgcggataatgcgtccatacctaccagctgtacgatttcatttaactcagactcttcctgcagcaggcgcataagacgggcgcgcagctcggtccagtcgctctccacctctgcgttgaaccatttttccatggtgtccacatacagggagtagctggtcagccagttgatggccgggaaatgtctcttatatgccagatccgcatccagggaccagaatacctttacgatacgcagggtagcctgtgtaaccggctcggaaatatcgccgcctgcaggggatactgctccgataacggaaagagcgccctcgcggttgtcctggcccagggagataacacggccggcacgctcgtagaactgtgccagacgggaacccaggtatgcagggtaaccttcctcaccaggcatctcctccagacgtcctgacatctctcgaagagcctcggcccaacgggaagtggagtctgccatcagggctacggaataacccatgtcgcggaaatactctgcaatggtgatacctgtatagatagatgcctcacgggcagcaacaggcatgtcggaggtattggcaatcagcacagtacgctccatcaaagacttgcctgtctttgggtccttcagttccgggaactcgttcagaacgtcggtcatctcgtttccgcgctcgccgcagccaatgtaaaccacgatatctgcgtcagcccacttggccagctggtgctgtacaaccgtcttgccggaaccgaaaggtccgggaacagccgcaacaccgccctttgcaattgggaacagacagtcgataacacgctgtcctgttacaagaggcatatcaggggacagctttctctgatagggacggcccttacgtacaggccacttctgcatcagtgaaacaggatgctcctgtcccttctcgtctgtcacaacagccactgtatcggtaaccgtatactctccgccgctgatataggtaagggtgccgctaacgccaacaggaatcatgatcttctgctgtaccacatcggtctcctgaaccgtaccgatgatgtcgccgccgcctaccttgtcgcccgcatttgcagcgggtacgaaggtccacttcttctcacgcttcagggagggaacctccacgccgcggtttaacaggtttccgcctgttttctccataatggcatccaggggacgctggataccgtcgtatatacttccaatcaggccaggccccagctccacgctcatgggtacgcctgtggattccaccggctccccgggtcccagtccggatgtctcctcgtatacctggacggaagccttatcgccatgaatctctataatttcgccaatcagacgctgttcgctgactcgaaccacgtcgaacatgttcgcgtcgcgcatgccttctgcgatgaccagcggaccggctacttttttaattacgcctttgctcatcttttacctccattgttattgcccattaaatataatatccgagccaactgcctgctccactgacttcttaactgccagaataccttttcccgtattgcctgatatgccgggaatcagtataatggccggaaggccagcctcacggtagcggttgatctccggttcaatctgggcggccagggcctctgtaatgtaaattactgcatagccgctttctgccagatccttaaccttctttcctgcctccgccgggtctgtcaaaggaaatggttccagacccaggctggcgaaaccgtagatactgtcccggtcgcccataactgcaatcttatacatacatctcccttatcctttcccggatggactcctcgggaagatggtttaatttcccggaaagcacaatccgaactgatttaatctcgttctcccgtgccagaatataagctgccagcggacccagaccaaaggcgctgtactgctggggcttaatcttacgaatcagcagattgtcgcaccaccgctcaaaagctgaaggtgaacgccgcaattcttccactgcatctgcataggccgtggtttccaggtatgaaccgatggaatccacgccttctatggctgcctgagccagacgggcaacgttgatgctgccgcatggtgccagcgcctgttccaggaatgccctgtccttgccggtacgggatgcccgcaccgccgtctttatatctgccgccgcaacggtcagctccgcatagagttccaggaactcattgccggaggatttgccggctgcgcagattgcatccagggctgctttgtcgattatgatatcgcagagctgtccgtcctgggtgtgaaggagagccttgtaggcttcctccgcaggtgttctcatggccgctggaagattctggaattccctggtctgaactgcttcacgtatgagcttcacatccacagtcccctgctccataaagatgcccgggtattcatcacccatgcggacctccttgatggctgccttcagattgtggtagtcgttggcgtacaggaacacgtcgaataccgacatatcctccaccagctcgttaatcagctcccaggtcttcctcttctcaatggccaggatgtcagcggcatttgtcatgccgtcctctccccagcccttctccataagaagctggatacactcgtcatagtcttttgcagccgtcagctgctctaaaaatgcaccggatagcagggacaattctttggaacggatgcgggctactgcataaacatactgtttgtctgccatttaattagttcctccctacgttcatgaaaacagaatctcctgcactttatcctgcaatacctcatgtgctgcgtcaaagagagcgtcaatggaacagttctcctcaattcctccataagtaagcacaaaaccgccgtctatatcccgggtgtctccggatatgcgcagcactgcccccttgtccttaagagcagcatttaacctgtcctcaaagccttcgggcaggcgttccaagtccttctttgagaacaggagctcgccttcgccggtctgtgcggatttaactgcaagtttcagaatcatatcaaagtaggcaccggtctcaagccccttgagttcggccttagccatcccaatggttgcgccgatgagtctctgcttttcagccagaacagcacccctcttcttaagttcggctgccgtgcgtcctctctccagaatgttggctaccgcctgtttggagcgcctctcaatatcaacgcactccctctctgcgtccgcacgggcctgtgccagaatctcatctgccttggaacgggcttccgccctggtgcgttccgctgctttctgggactcttctttaatctggctgatgatcttatctaatcccgccatgccatgttctcctttccttaagtctcctatttggtatgctgattaaatgttaagtcctgcaataccaaagatggaaaggatggagatcagcagtgccaggatggcgtaagtttcaaccatggccgggaaaatcatagctttaccaaactgctcaggtctcttggcaaccaggccgatacttgctgctgctgccttgccctgtgatgcgccggaaatccagccaacaatacccataggaaggcatgctgccagatataaagcgccctttaccaaagaaaggtcagcgcttccgcccataataccaatctgtgtcagtgtgatgaatgcaatcagcagaccgtagataccctgtgtaccgggaagcagctgtaaaaccagaaccttactgaacttgttaggatcctctgtaacaactccggccgcagcctgacctgcaatacctactccaatagcagaacctactcctgcaaaaagtgctgcgattgcagctcctaataatgctaaagcaactcccatatttcccataactaaatgtcctccttgactttataatatttggtgtgaacggcaaagggctcaaatttccttccgccgccttcataaaactttccaaaaaactctacatactgcagacggttagtatggacatatgcgcccagggcattgattgccaggttcaggctgtgtccgattaagaataccagtatgaatatgattgctccgggaatggaacctcccatcatacttcccatcttgttaaataccgtggatataacgctggtagccagacccagggccagaagtctggaataggacaggatgtcgctcaggtatgagctgactccgtatgccccgtaaagacccttaagtatcctcttaacccagtttttggactcccgtccgctggtaagtacaatacccacaaaaccaatggctgccgcataagctgccacggtgccagcaactgccggaagcgtaaaggtaagacccagcatctcggtaaacatggacatggtcagcaggtatacaataccaccgccaaccagcatataccagaatatggcgtcataaataccgtcagccaggctgccgttcttcacacaggagtagaatttgattccaagtccaatgaaaaggtgaagaataccaagtccgaacgcaaataccagaagcttcataggaaggcttaccggttcaaaccagagaggagcaagcctgatatccggccggttgaagaatgtggtcgcgataacattaaccgcatctccgaaaaagctgccgaacataaagccccagaatgttgtagagataccacagtacatgaacatcttcatgaacttcttcattccggcttccatgttcttgaatttggtaaggcagtacgcagtacctgccaccatgataagaccgtaagccgcgtccgagagcatgagcccgaactgtacatagtagaacaatgccactatcatggacgggtcaatctcgcccttggaaggaacgctgtagctctcaataacgccctccaccggttctgcgaacttattgttgtggagcaggatgggcacatcctcctcgtcgcccggttctgtgtactctacaaccacctcatacttttcctgaagcagcttttcaagctttggagccgcgttctcaggtacgtatccggttataaagaatacgcgtcttgactgggccaggccgtttaacacaccgtatttctcagcacgcatggtatagtaatccataacgaactttatgagttcccggtccggagccatctccgccacagccttttccgctttctcaatctccgccttttcctttgcaagctcttcttccagctgctgctggcgttttgcaggcactgctgagctcaggggcggttttacaaaattcattttcttcagagcgtcctccactgcttccgcatccgttttcgcgcagacaatgaaaagacaggtctgctccttggacgcacttacaatggtcacatcaattgtctctgcctgaggtgccagctccccaagctgctctgttacctgttccagggtaatttcatcctggatggaaccgataaatgccgcagttttcttagttcccttaaaatcaaggggcaggtcaaaggatctccatggcaccagtgcttccatctgctgttccagctttggaaccgccgcactgtgctcgcctatctgcttggcaagttcctgtaagcggtaggcttttttcatgacctcgtcgtgtttgcctgcattggcctcatattcgtccagggaaagcacttccctgccttcgaacgaggacagcatgcccttctcctcaggcgcgtacctgtccagaatattaatggcctgctctgctatattggcatttcgttcaaatacggttttggaagacgtcacgtccattctgcccaacatgtcatcttcctgcagcacattgctgatttcaagtaccccttggcgctgcagaagctcaagggtgcccttgcgatcctttttcagaccgcatatcagcacttttttcataggcactactgccaaccttaagcgcctcccttcctatagcagttctgataagataacttcaactgccttttgttgtttctcagctacagccttctgcaatgcttccaaatccttgccttcctcggcaccggccgcctgcatcatctgctcgctctgagccttggcatcctcctcggcccccatggcgccttctctggcagatttcgtcatctctgccttcatctgcgccgcctgagcctttgcctctgccacaattgcctccgcctcttttactgcttccttctcggctgcttccgcggccgtttctgcctgacggattgcgtcaatcgtctcctgggccaatccaaatccccctttctgtaccggaatcccgttagctatcctgccggaatatatggttagtttgcgcagatatgcctccgggaatacgatggaccatacgtttgtgttgcaaaatgacaacttatccagtatttgtccatagctttcctattatttttgtacaatatgaatagattataacccatgcataaaaatttatcaatccactttctcaatatttcatgaaaaaattttagactttctaaatatttttgtacagcatacaaaaaacttctatccatattttaatagctgcccccttaaacatcacatccggcgggacctatttgttacattaataacaaatttttttattaaaataggctgcagtcccaacgccttccatctgcgtcataagctacagcctatttaataacatcatatcattttatcctgttatttgaaacagtaattttttaacatctttttaacgcacccggactaatccgcaataatcatccgtttctttccgccgccgttcatcaggctgtagtatgcaggaagcataagcagcgacagaatggtggatgcggtcaggccgccgatattaacaagggcaagaccctgtgtggtggaaccgctgtcgcccagagcaagggccatgggcaccatggacacaaccgtggtcagggtggtcatcaggataggtctcagacgggtagcgcccgcttccaccagagcagtatttaaatccatctccctgcggtactggtttaccgtatccacatacagaataccgttattaacaaccgtaccaaccagcatcaggaatcccagcagggacgtcatgctgatggcgctgtctgccagccacaaaagaccaaaggcacctatgaggcagaacggaatggtggtcattaccatgattgagaacttgggcgactcgaactgggccgccatgaccacgaataccaggaagatagccagggcaatggcctggaacagagccgtaaactcctctgtcatggattcatccatctggttctgggcaatggttacatttgcattatcacttacagccggctgcaccacctcgcttaaaagcagggcctttgtgtttttatccgaattctcggtatagataccgctaatagtggcgcggtactgcttatcctgcctggtgatggatgccgggctgtctgcaaagtgaatgtcagccacatctgtcagcgccacggagctgcccttgggcgtctgaagggtaattgtctcaatctgatccagggtcttatagcgctccttaggatactctacctttacatcaatatcatttccgtcaatattaagggaggtgggagtggtgccgctgagcatgttgttcagggtaccgccaatctgggccggcgtcagtcctgccgcccttgccttgatgggattcaccgtcaccttgacaactgaggccgcgttctccaggtcggaatggaccttggtcagctccggacgtttgcttaagttttctgccagctggtcgctgaccgccttcaggtcatcgtaatttgtactctgaaggtccacggagtattcatcatccgaacccatcatggcgctgacctgtgagtaggcttccactgttatattggtatcggagattccgcccagctgctgcttccagaggcggaccacctcatctgtctccatctttctgtccttcttaaggtaaacagtgatgttgggatccgagctcatgctcagtcctgaacttccggccagagtaatataggattccacatccccctgctgggagataatatcctctatctgcttcatgatatggtccactttatcaatggtcatacccggctttacttccgcggtaatggatatctggccctggtcatcctcagccatcatctccacacgcaggaacttggctatgaagaaggagaacagaaggagcgctacagatgccagcatgacaagtcccctcttgttcagaagctttgtcatgattcccctgtaggcttcctgcatcttttcaacaggtctggacaggggagctgtctttttctccaccggcttgtaaatcatatagcacagaggcaccaccgtgatagccgatataagggatgccgtcatacagaacacaatggtaaagcccagaggccggaacatctgccccgtcataccgcccagcatggccagcggaaggaataccacacaggtggtcagcgtggaaccgataactgactggtacaccacgccggtaccgtttaaggccgccttggaaaattcccggaatcctgtgtcatccgtggccctgaaacagctctcaagcacaacagtggagttatccaccatcataccgacgcccagcaccagggcgctcagggtaataacattaaggctgaagcccatgagctgcatcagtatgagagacgacaggatggatacgggtatggagctgcctacaatcatagacgccttcaggtccccgaagaacagccaaatgatgaccatggaaatgataatggccagtaccattgtctcgataacagagctcagggacgacatgatggaatccttgtcatcatctactatggtaatctgcaggcttggatccttggcggtaagctcattcaccacccgctttacatcttttgagacattcagagtggcggcgtcctgctgcttgctgacagtcagggccacgatatcctcgggaagtccgttctcagccttataacgcgcaatactttccacatcatccgcgcccatatataccttggccacatcgctcaggtatacggtctggccgccggatacggtcagcggaatatcattgagactgtccatggtctcaaagggctgctcggttgacacagacagcttctggtcacccacctgcgtatctcctgccggatatgtgatatccgatcccgcaatatcgctggcaatagagctcatggatacgccgtactgtttcagcttctccggcatcagctccaccttgatgtatttctggagtccgccggtgatggaaacctcggctgctgttgacagcttctcaaattcagggacaatctcattgtttacataattgtacagatcgtcgtcctcaccatggctgaccgccatgattacatttggcttcaggctggtattcagctccagcatgatggggtcatccgcatcctcaggaagctctaccttagccaggtccatctgtttctttaaatcatcatacgcatcgttcatatccgtgccgtacttatatttcagcatgacgatggacatgttctcctttgactgggaggatatggtatccagaccgctcagggtactggccctgtcctcaatcggtttggtgaccagctcgctgacatcgtcagggctggcgccggagtaaacggtcattacaatcatcatggacatgttcatatccggcatcagctccagcggtgatttcatcaccgaggataagccgaacacaatcagacacaggattgcgagaaccgtactgaccggccttcttaagacaagttttgttaagcccattttcctgcctccttctattgtgcctgactctggtctgcggccggactttcagctttgtctgtctgatcggtttcctggatgacctgcatctttatctgggcatcggtttccgttccattcatctcaatggttgccggcgcctcgatctccagtgtcaccttggtcccctcctttaattcggaggtccaggtggtgaggatctggtcatccagggtgattcctgaaagcaccgcgatattctcactgtcatagatacccacttccacgggtacctcatggatgatgccgttgtcatatgtatatacgtaggcatcgcctgatttataatatacacagttatttggaatcagaatggcattcctggcagatgcagaaggcacccgcagctccacactggttccggccgccatggtctcattgtcatccacagacgcctttatcttgaacaggcccacggatgcctcagccatgttgctgacttcaatgacattgccgccgtattcggttccttccttgatgaccgtaatgggatcacccgggttcaggtggttctttaccttctcagtcacatagaaagtcacattattgccgctgtctcccgcgataacgcagagctggttggagtttccgactgtatcatgaacctccacattgagctgctccacccgtccgcttataggggatgttacatggctgaattccatctggttttcatatgcaatcttggcggactcatactgaagtctcttggcctcagcagcggtctgatatccctcaaactctttatcagatacaaaacctgaggcatggagcggagccatacgggccagggtagactgtgcgtcatcccatgccacctttgccgcgtccatggagtttttggatgtgtccacctgctttgtatcaatctccagcagcacctgtccggctgcaaccacatccccggccttcacgttgacagctgtcacgtcgcctcctgccttgggatatatgtatacaatgtcggccggctcaatggtgcctaccaggtctgttgtcagtaatatgtcgcccatatgcggcgtctgcaccgttaccaccggatccggggtagggacaacaggctcttccttcttgaaaactcgggcaatcacaatgactgctataattacaatcacgattccccagataatgcgcgtccttgcctttttcatcttctcctctttcctttcatgtcctttttagtatgagaatctgtcatagcaccggcgctgtccagtgatggaatacagcaccagaaaaaaacaagggaaatgagctgctttggtccacagcccttccccaaattacggcttccttcttttttaccaaccatcttgtattttagacagttgcccccctttttgtctaacaccaaaatgcggataattaacaacacattgttgttaattataattatttttcaaaaatttaataaaactttcaagtcttttctcattttctttacgccatacaatgatgacgctggcataggcctggttcctggagttgggcatagggtgcataaccaggcgttccccgtagttgtgataaaattctttaaagccgatatgaatcccttcattggcaataattgccagctccaggctgttgacattttcataataccgggccttctgaaggacgtgctcctgcttggcaatcagttcaaacagccgcagctcggcgccggcaaaaaaattcttgaagagacagagcatggtctctcccttaaaatcctccatgaccacatcttccttctgtgccaggggatttttctttgacatgacatagtataagggcagtttttttataaccatcaggccgcacttctctttaagctgctcgtaggaaggagtaaaacttaccgtcatcatcaaatccgggtttccgttggttatatcttttatattggtgaattcattgatttcaaattccacctccgggtcaaaggccatataatcagccagtatgttgcccgccatctctatgatgccgctcatacccaccacagacagattaatcctgcgtttggctctctccccttcttccctggccatatccacggagtcatatatttccttggggatatccttccagcgccacagaagaagctcaccgctgcgggtcagcctcacatccctggtggtcctgtcaaaaagccgcagctccagttccttttccagagatgctatctggcggctcaacccctgctgggatatatacagatggttggctgcctccgtaaaattaagggtcctggctgcttccaggaaacattctatctgatggatggtcatggatatactccttttgtgtgcgttccagtattgttataagctgtccggcgtatcctgttttgctgcatcctgttctggcgtatcctgttttgctccgcccagattcagaaccgcggacgggtccagggcgtctctcagggcatcgcccacaaaattgatggcaaccaccaggaccactatcaggagtccgggcggaatccagagccagggctgctttgtcagcacggtcagggactgggcgctgttgagcatattgcccaggctggctgtgggcggctgcacccccatgcccagaaagcttaaggaagcctcatccagcatggacaatgccatgaccgaggtggcgtacaccagaatgggcgcaacggtattgggaagtatctctgaaaacaggatatgtctggcaggcatcccggccactatgctgctcttgacaaaattagtctcccgcaggctcagcacattgcccctcaccagccgggcaatgccgggccagtccacaaatccgagaatcaatatgatgctccagagccccggttcaaagatggctgccgccaccagcaccagaagtatatacggaaaggacatgaccatgtctgtaaaacgcatgatggctatgtccagccagcctccaaagtatccccccagcagacccaggctgactccaatggcagtggatatggctgtagccagcacgcccaccagcagagaaatacgcgttgcatataataagcgggagaacatatcccgtccgatctggtctgttcccagcaggaaccccgggcccggcggggcgccaaagggtcctgcgatggcatccgggtcatagggcgctatgacaggcgccaggatggccgctgtgcagataactgccagcaccaccagactgatgcaggccagacggtggtggagaaaccgccgcctgacggtctgccagtaattttctcttccaatgtccccataggggttctttctgttcattttcattctatctatgcttactcctgtcaagtacttgcgccggtctgtcagtcatactgaatagccgggtttacaatggcgtacagaatatccgtcaccaggttggctgccagcaccaccacggcggaaagcaggcagacgcccatgattaccggataatcccggttcagaatggcgctcatggtcataagtcccagtccgggccaggaaaacagctgctccacaatgaccgcgccgccaaacagcaccggaatctgcattccgataaccgtcacaatgggcaccagggcattgcgcagggcgtgcttatatatgaccatcctgcgcccgattcccttggccctggctgtgcgcagatagtcctgctggaggatttccagcatggcgctgcggatataccggatattggtacctgccatggagacagacagcaccagcacaggcatcaccatatgggccgccacatccgctgcgccgcccgcagttcccagggtggtcatgcctccggatggcagtatgcccagattcacggtaaacaggtacactaacagcagggacaggaaaaatcccggtatgctgcttccgaaaaaggaggctgtgaccacagcgtaatcccccttggaatactggtggatggcgctgtaaatcccggcaggcaccgacatgataagacttactatcagcgacacccccatcagaaggagggttggtcccagatggcttccaatcatggcgctgaccgcctcgtaggatttcacggagtaccccatgtttccggaaagaagctgcccaagccagataaaatactgtatataaaaggggttgtccagtcccatggccgcctccttggcagcaatggcttcctgggaaatacgggctccctgaagcatttccaggggactgcccgcaaaacacatgatggcatagtcaatcatggtaatgccaagcagggtgggaatagcaatcagaatacgcttcagtatatattttgtcataccttcccgtcctccttctctaattccttaaaccggatacaggctgtcaggtggctgcttccgggaaccgccggcctcagctccatttccccgctcatgcactcccccttacagtgagggcatctggggtggaagggacatcctgaaggcgtatttacatttgacgcagtctccccgcccacaattccctctgaacgcgtccttcgtttcctcggatcagcgatgggcaccgcctcgaacagagccctggaatacggatgaagagggtggtcaaacagctccttccggtccgcaatctctaccatcttccccaggtacatgacggcaatccggtcgctgacatagttcacagcccccagtccgtggccgataaagatgcaggtaagtcccagctccttctgcaaatccctgagcaggttcagtatctgggcctggatggacacatccagggcgctgaccggttcatcgcacaccagcagtctgggattcagggaaagggccctggcaatacctatgcgctgcctctgtccgccggagaattcatggggatatcttcccagacagttcttaggaagccccaccatatccagcagcctctccacatgggaatacacatccccgcgtttggccagcccatgatacagcatgggctctgccagtatctcaaacacatgcttcctggggttcagggatgaataggaatcctggaatatcatctgcagctgggtgcggaagggcttcatctgggcctggctcatatggcccaggtcatgaccgtcgtagacaacccgtcctcctgtcggatgttccaaccctaccagctggcgtcccagcgtggatttaccgcagccggattcacccaccagccccagagtctccccctcaaacagctgaaaggaaaccccgtccacagcccgcaccacaccggcggaacgggagaacatgcccgactttgccgtataatattttttcagtccctccacagaaagcagggggacccgggatgtatcagccatctgccagcacctccttcgccctgcagcaccgcacaatgtgggagtcccccacagacatctcctgctgcggcttcatgcatatctctgtcctgaagggacatctcctggcaaaacggcaccctcgaatacggtcgtaatgctccggcacaatcccctctatggactccagtcttctgtcctcctcatccctgatgccgggtacagaacgcagcaatgctctggtgtagggatgggccggatggtcaaacagctccagcacccgggcctgctcaatgagctgccccgcatacatcactaacacccggtctgccatctgagccaccagtcccatgtcatgggtgatgagcagcaccgccatgcccatctcctccttaagctccagaatcaggtccatgatttgggcctgaatcgtcacatccagagccgtggtcggctcatcggcaatcagaagggacggattacaggaaagggccattgcaatcatgacgcgctggcgcatgcctcccgacagcaggtgcgggtattttttcatcacagatagggtgtccggcagccccaccttcttaagaagggacaacgctctctcccgggcctcatcttttcccagccccatgtgggcccggatgctttccgtcatctggctcccgatggtaaatactgggttcagggaagtaagagggtcctggaatatcatggtcagccggtctcccctgactccgtccaactcccgctccgtcatggagagcaaatcccttccctcaaacaggacccggccggccgtcaccttgcccccttttcccaaaagtcccatgacagacagggctgtgacgcttttgccgcagcccgactcccctacaatacagactatctcccccgaatccacatggaatcccacgtggtccacactgatattcttccccccgtcaccggaaaattcaacttccagatttgtgacttcaaggatatgtgacatattgtttcctcatttcttaatattaatggcccatttcccatgaatgaagatacccagagagcatatgccctccgggaatctgttcatacgttccgattatggggttgtcctgccgggatacattcaaatggaacatattctattgggatacatcccactgctccacatgattgaagaagccatagacgctgggcttaaccccggtcaggcgcttattggccgctgccatggtcttgataatgtaggctgaaaacatgggtacatcctcctggacgctccggtctacaatcccgtacagctccttcaacttgtccttgtcgtttgtcagggccacatttgacagggcttcctccacctccggcctggtatagccggtccagctgccctggccgcctaagagccaggcaacgtccgcgtaaggatccaccggaggatacgtatactgcacggacaacacatcaaaatcaccgctggaagcagtgctcatcagcgtattgatgtccatggtctggatatctgccttgatgcccaccgcggcccactgggctgctataacagaagcagcgttcacaaaggtactgtcgcctgagtcaatgcagaaacggatgcttttgctctggtcccatccgctctgtgccagcaggctctttgccttttccggatcataggaaacaggcaccagggtactgtcaaaatacgggctggctgatgacaggaaaccgtccgccacttctccgtttccctttaagagctgctccagaagctggttccggtccactgcgtacagcatggcctgacgcacctttgtatcggtgattctggctgtattgatgaatacggactggttggtaatggggtctccgtaggaaacctccacgttctccagcgccgccacactctcatagtcctccaggggaatggtactcatggtgttctgggtaatgtcgatttccccggacttaagcccggcataaagctggctgccttccacgatttttatgttgaggcgctcaatcttgggagcacccttccagtagtctttgttggcctcataagacacatagtggtcccgatcaaactctgtcaccttatagggaccgctcaccacgtccgggcggctaaaccatggggctgacgtcagcgccttctcatctatatccccaatcacatgctttggaaggggcatgagatagcgggcataagaactgttaaaggttatgagcgacatgggtgccttggtggtaaaacgcacggtcttatcatccaccctggtaatgccttccacatggtctgccccttcttctacaaacccgttgtcgcccacgccttcaaatacataatacatcatagccgggtttccgatgaccgggctgcacagcctgagagccgtgtacaccacgtcgtccgcagtgaccggagtcccgtcggaccatacggccttatcatcaatgtgcaccaggaaatttctctcgtcctcagctgtcacggaatcagccagcattccctcaaattccatgttctggtccagttccaccaggggcaggaacataagacctgttgcatatttattcatctccacgccgtccatcagcaggggattcagcgtattgagagagctggtcactccgatattgacaatcttcccgctgccagcggccgctgactgggtctggcccgctgctgcctggcctgattccgcctggcccgacggctggctgccgcccttgcccgcacatcctgccgatgacaggaccatggccgcagataaagacagggccagaaatctgcctgcccttctccctgctgttccttttgtatgtttcataagtttcctccttaaaaccggcatccgtctctgcacagcgctgcgccgtgcagcaaaaccacactattcatagcaaattagtatggttttatttatatcattacacgcaaaaaatgtcaatagctctgtccccccggcttttaaaataaagtggaaatttactccatactgctatagaatagggttaaaaggagtaagcttctcccctcccttgttcctccgtccactctgcgttacctgctaagcagggaggctgctcctgtcctttgtaaaatccgtgaggcaaaagatgtaatacactactgatttttcttttgatccatgcctcattgtggtacaatgccttattatagacaaaactctcaatgaggtaacggaggtatgcttatggatatgaacctgatgctgattatcgtacaggagaatgatgctgaatcactggcatccgcatttaagagaagccagattcaggccaccaggatagacgccaaagggctggtttccagcaggaaacttaatgtattcctggttgggacggaacggacggacgaagtattgcagctggtgtcttccaactgcaaagaacgcgccatggagatagaggaccaggaatacaatggccatatgtttgtggatgtacagaaaaccatcgtcattggcggcgctaccatcttcatcctgggggaggccaggctgatgaaggtcaagggcggatgctgcggggattaagggcagccggaaaacataaggcaaaaaacacaaacgcaaaaacgggactccatacatcacatatggaatcccgttatcattttacccatcaatccctgctgaacaaagaattaatcgcaggtatatggcataagagcgatatgacgtgcgcgcttgatagctacagtcagggctctctggtgctttgcacagttgcctgtgatacggcggggaaggatttttcctctctcggatacgtatctctttaacttgttaacatccttataatcaatggttccgttcttatctccacagaatacacaaactttttttcttctgcgcattccgcctggtcttctcatcttagcgccatctggtctgtctgttttattaaatgccattggtgttgtcctcctttattattaaccatggaacatcctagttaaatggaagtccttcgtcctccactccatcaggaatgttcataaacccatcaccaatcgcactggtaggagccggtctctgagaaggagctgcctgggcatatcctcccatttcagacgccgcacccttactgtctgcgaattcctggtcatccaaaatgacctcggtggtgtatactttctgaccttccttatttacatagctacctgtctggattctgcctgacacaagcacccgcattccctgacggaaatacttctcggcgaactcggcagcgcggtcaaatgcaacacagttgataaaatcggctgtctgctgctccgcggagctgtcctggcccctgcgtccccttctgtccactgcaagagtgtacctggctatagccatggaacgctctccctgtgaatatctgacttccgggtctcttgtcaatcttcccattaagataactctgttcatacggtcacacttcctttttctctcccgccataggcggtctgggtatcccttatgcctctgccttaacgcataagtatctgatcactggttccataatacgaatgtgagcctctacttcattcgggcatacagaatcagactcgaactggatgaagtagtagtaagcttcgtgcatcttctgaatttcataagcaagtctcttcttgccccattcatctacatttgttacagtgccgccgaaacgggtaatgtaaccctttaccttttcgattgctgctgcacgctgctcgtcttccagcttcacattcagaacaacggttaattcatacttgttcatcttgctttacctccttgtggtctctggcccctgctttcagtaacaggagcaaggatataatatgtcacggagtattattttaacaaattccctggacaaatgcaagatgtttttttgttttctttcatttttatgacggatttcgcggtatctccagggggcggctgcttaggaatcctcttttgccttggtaagtcctctggtatttttctccaccagcctgcgggcaatcatgatttgatgtccgcaccccatgcatttaagccggaaatcagctcccaccctgaggatttcccactggctgctgccgcagggatgggtctttttgagctttactatgtcccctacttcataattcaacttttcattcatgccatatctccatttctgtatatgggtctggccgctgcctgtcaccctttcagtatgccttctatgtcagccagctcttcacagctgaatgccgggctgtcaagggcctttgcgttatcctccagctgggcaatactgctggcccctatgagaacgctggtgacttccttcctgcgaagtacccaggccagggccatctgggccagggactgtccgcgctcccctgccattttgttcagagccctgatttttaccagcttgtcctctgtcagatatctgccgcccacagtggtcccttcctttgaagccctggatccttccggtatcccatccagatatctgcccgtcagggcgccctgtgccagggggctgtagcatatgcagcccacgccctcacggtccagaagctcgaaaaggccgtcctccgcccagcgctcgaacatattgtaccgcggctggtgaagcagacagggggttttgttctccctcagtatgcggatggctgcctctgcttcctctgcctgataattggaaatccccacatacagcgcttttccctggcgcaccatgtctgacagggcgcccatggtctcctccaggggtgtctcagggtcaggacggtgatggtaaaatacatccacatactccagtcccatacgctttaggctggaatccagactggccataaggtacttcctcgatccccagttgccgtatggtcccggccagaaatcaaaccctgcctttgtggagataaacagctcatccctgtaccttcccagaccgtcccggagagcggaaccaaaattttcctccgcctttcccaccgccggaaatccatagttatttgccaggtcaaaatgggtgatacccatatcaaatgccctgaaaagaacagcctcctgttcctccaggctcttttccagtccaaaattctgccacagtcccagggatattcttggaagcaggacaccgcttctgccgctgcgtttatattccatgctgccgtatctgttctctgccgcctgatacatctgtgataccttcctttcctaatcaaccacagtcccaaggacctctccaatcggatcgctgataaccagatccgcctgggaatcccttgaggtggccgctttattgatgagcaccagtttatggcctctgtagtagtcaatcagtcctgccgcaggatacaccaccagggatgtccctcctatgatgagtatgtccgcatgtctgatatagtccacggatttctgcagtgtcctgtcatccagcccttcctcatacaggaccacatcaggtttaatcacaccgccgcagctgcaatgaggcacgccatcgctctttacaacgtagtccagatcataaaactgtccgcatctggtacagtaattcctatgtacactgccgtgaagctccagcacctccccgctacccgccatctggtggagaccgtcaatattctgggtaatgaccgccttaagcttccccctctcctccagccgggccagggccttgtgggcctggttggggacagcatcggtaaacagcatcctgtccttataaaatcggtagaattcctccggataccgcatataaaagctatggcttatgatggtctcaggcgggtacttatactgctggttatagagcccgtccacactgcggaaatccggaatcccgctttccgtggatactccggctccgccaaagaacacaatgttatcactgccgccaatccattcctttaactgctgccatttttcgttcataacattaccccttcctgcctctgcaacccatgccttatctatagacttatctataagccttatcttgcagccttatctatagccttatctacaccacctcatccagatacacgccgtccaggacctgcacatatgcgcaccagaagggcactccattttgttccccctctgccagctcctccagggcgctgtatccaaacagccaggatgccagctgttctatggtaatatccaaaacctccgtggaaaccagcgtccccggataatccggctcctctgcgcattccccggtatgaatctttggcagggatacccctttctttgtaagggaggatccgtttccgtcaattttccatctccacaaaccgctgttgcccggtatcagcgggtcatggatattgaccatcacatccatggcaggacagggacacccttcatccaggacaatggcctccataaaggaacgcacatcggtaatgcgggccatgattgccggtctgggcgcatgctggccgctgtccggttccagccatctgtccctgcccgcatacaggaacctctgctcctgcttctcacgcccccaaaaggcctggaacgcctgcaatgaccccgacacatcataccatccatatacgcttcccgcctcgctgtctaactctgactgaagcatctccatataatcccggtcgcgcagcgcatagacctggtacctggaggagagccagtggttcatccatccggccagcgaggaacagagatttccgtccagccgaagttcccgcctctgaaggcattcctttgcctcagatcccagtctgtactgaggctggtcaaatatataccggaacccaaagggcctgtagatatccggcgaggccggcatgagatagcagaagggcttcctgtcctgatgcatgtcccccagcatcttcatgagcacatccctcatatgtccgcggtggcggctgtcggcagccgtagccacgccaacgatataatccagcttccacatcttctttcccacattgatcctgtatgggttcatatgggccatggtgacgatacggcctgtgccgtcctccttcactagtacggagctctgtagtatttttttatcaaaataatagtctgcaaattcccgggaatcctccggaaacgcttcctgccaaaggggcctgcacgccccgaactcacttttctccaaataccggatcatcgttccctcaccatatattttcttgcaaatccaatgggacaatagctcatcttggcctttctcagtccctccatgcccacatcgtcctccctgttcaccagttcagcctcaggaaattcattgattaggaactgctggttgataaactggtacagacctctgatttcagggttggccttctcaatatgaatgacagccatattctcacgcacattcaggcttccaatggtaaacgcctccagctggccgtcgatatataccccggccatcctcacgtagaggctggaacaatttttaagtatatcgtggatccctgccacctcataatccagggacagctccatggcgcccacttcctccttgtgctgcctccagcgctccataaactgccacacctcatgacggtcggagcagcacagacgcctgtactcataccggccttcataggtgcgcttaaagccgttcaggtggtttctcttcttgacaaacttctttccctccagctttctcagctcctcaccgctgtagaggtagtcctttaaatccacctgttcctccacctcaaaaagggccggatccaggttcaggcactgtaccgcttcctcatcggccagggagatataaaaaggcttgtgaagcacacccgaaaaataatccaccatctgctgaaaaaagtaaggcaggtcctcctccctgcacagaggcatggccgtggaaacctggccgtccttttccataagccacaaaacagctcttccctcgctcaccgcgcactgtacatgataatagtccttccacaaaaaactgtccagaaacacactgtcacatgttttattgggcctcagcccgtaaaaaggccgaagcctgtctatatccccggccaccaccggcttaaattccaattccatagcatagcaccttcttttcatttaacttctgatagtataccataaaaccgggttctataacagtttttttgcatcacaggaaaaagacctggaagccgtcttgtttccagatctctttcactttccggacctcatttttccaaagccgccggcctcttccggcaggaacctcccttacagtccctgggcaatctctttcaccagcagcagcctctgccccggtttcacctggtcgtccgccagttcgttggtggatatgatattgcccactgttgtatggaatttttttgcgatttcccacaggctgtctcccggctgtacgatgtatcccacgattcccggcagctcctggagcttctgcagatccatgggatggatggctgcccctgtaatcaccggttcgcacaccggctgcagaaccagaaagtccagggcaatcactgccttcacttccaccatgtccccgcccatcatcacggcgctgagctgttccagccctgcatccagctggtacacgctgtcctcccggattcctctggcctccgccacgcagtggaagggcacctgctccacagaggactggaccggtgacgtgtcatcgctggtgagatataaaagggtcacttccagcacaccgtcaatctccaggcagtcatccccgatttccacctcatccagtttgatggtcccctcgttgtggcaaatctggagaatccgctcagcctggggcagactcagcttctctgccaccttggatttgcacacattcctggtcagtatctggtcaaaacaggcgtctgaacggttcagctctatctcccggttgttggagtacatatcgcttaaaagctcgacctcctcctcctcgtagagcttgatatccagctccagcaccgcgtccacatccatttcccgcatttccccgtcgtaatcaggcttggcttccatgtccttatgggccaggcgcactgtcaccatggggatttggtcctccttcacatcacccatttccatgtcccctgaaaatggtatggtctcctccagccactggacaggcatattttcatcctctgccccgtaaataacaaaaacactgagttcaccgtccagatggagccttccgtccagtggtttagcggtcacgtcccgcagcttcatttcccgccataataactgacctatgttgggcttgcctccggtaaggctcagttcctccttaatccggtatgtatccttgcgcctgacagcaatggcagccgcgttggccgtgcgcttaagcgtctccacctgcacctgtcccgctccgtccgtgtcagacatgccggcccctgcgggacggctgttattttccatgtccacatccacagcagcctccacgtccctcagggtctccacccgcacctgaagggtaatgatggcctggactcccagcttcctggaattaatcatatccgtgttcaggtcttccaacatccagttaagccccacgtaatccttttcctccaggccctggacattgacaacctcctcaaagggaatattgccgcccagggtctggagcccgccgctctccttgcggtacagcacctggaattccagcttcccctttaccgccaccttatccccctggttcttcactgtctcaatctgtatttcgccggtgtccagcatgacctgctccatatcatccagggtatccggtacaataaagtcatcgtccagggtaatctgcgtggtcacgttgcccttccattggttcatatgtatctgcttctttatcaattccataaaaaacacctgccatctctcatagtcttttagaaaaatctatgcggacagcaggtgatttatgctctttttctatctttcatcgtattcgtccataaagtggcggcgcaccccgtccttcacatagccaaggcaggcatccaggttgatgttctccacgcttttcatgatattggcgtctatgaaggggctggtctttctgagggagcggataagctccttcatctcctggcgcttggaggtgtgcacgatatcagccgcctcccctgccatgccccttgcagcctgttcctttgcaatccgctccgtaaaccggcaggcacactggaggaaatgcagaccgttgtaatccttccagtccagtatatcctcttcctttacatagtacaggggacggattaattccatgccctggaaattcgtgctgtgaagcttgggcatcatggtattaatctggcctccgtaaaggattcccataagaatagtctcaatcacatcgtcaaaatgatgtcccagcgctatcttattgcaccccagctccctggcatgggcgtacagataccctcttctcattctggcgcacaggtagcagggggactgctccacgtccaccacaatgtcaaatatatccgagtcaaagatgcgcaccggtatattcataagggctgcattatcttcaatcagcttcctgttgtccggattgtatccgggatccatgacaatgaactccagctcaaaatccgtccggctctgccgctttaactgctggaggcatttggccagaagcatggaatcctttccgccggatatacagacagccaccttgtcgccgtcctttatcatctcataatcctgaagccccttcacaaaggggcgccatatttccttgcggaactgttttatgatgctccgctctatatttacatggggtgcttcctgtttcatttgccgtgtatcttctcctgggtaggttatttttcagaccgggcctcttttaaggcgcccttaaggaaatcaatctccttctccatctgttccatccgccgtttcattgtctcgtattcctccagcgtcaggcttttcttttcctttggtatggtaaccccatcctttttgattggacgggcaggtatgcccacggcggtcacattgtcctccagcggcttcagcaaaactgcattggctgcaatggagcagttatcccccacctcaaaggcgcccagaatcttggcgcctgctcctaccatcacattgttgcccagggtgggatggcgtttgcccttcttggttcccacgccgcccagggtaaccccctggtaaatggtgcagttatcgcccaccactgcggtctctccgataaccactccgcatccatggtcaatcaggatgccccggcccagccgggcgccgggatgaatctcgataagggtgaaaaaacgggcaatctgtgaaatcagcctggccacaaaaaacatcctgtgattatagaaccagtgggcaaaccggtgccatataagggcgtggattccctggtacagaagaaatacctccagggcgttgcgggcagcggggtcacgttcctgtacggcctttatgtcaagccatatgtccttgaatatcatatttactccagcctttctttaacaagttaatacaacgctacggtaatacgacattttcctaaaaagattaaatatcgtatagtatagcatatgatattcaaattaaaaagagctttttacagtttgcgccctgtttcatacctcttttcaggcttttgcctccccccggcccggttatgctactggaataccacaggattttccagatactctgtcctgattacaatatatggaaaagactgttccgcaccggcattctcccccttttctgggcccttaagctccgtattgaccacaatagagttgtcggtcagatagagctcattgacgctgatgctgtagccgcctgtgggctgtacgccgtatcccaccgctatgtacagattctgttcatcactgtatgtgagcttaaacggctgctgctgtttttcagcaatcagattcttaagctcatccggcacatccatatcgcctgccactgtgaaatccaggtccctgaccttatccccgctgtcctttgacgcggagcagccggccagccacagggtcatggcaaacagcatcatgagcccaaggtacactttacccttaatagttcctttcatgttaaaacctcccggaatatatgatacaattactatcaatatattccgggaggccctgattatgcgtttaaacacatgtttgcgtatattctgactttataatagtcaaaccgatattatatggtgttatacgattttgcggatccatccctcaggcgcttcgatggttcccatctgaatgcctgtaagggtatcatacagcttcttggtaacaggtcccatggcgtccatgccgcttgggaagcagatttcctttccgtggtccacaatcctgcccaccggggagataacggctgctgttccgcacagtccgcactctgcgaactcatccagttcagaaagcttcacaggcctctgggttaccttaaggcccagataatgctctgccacgtacacaagagagcgtcttgtgatggacggaaggatggaatcagacttaggtgtcaccacctcgccgtccttggtgacaaacaggaaattggctccgcccgtctcctcaatataggttctggtaccgggatccaggaacacgttctcgtcatatccggcggcatgggccgtgacagacgcatgaaggctcatggcgtagttcagtccggcctttacgtggcctgtaccgttgggcgctgcccggtcaaaatcgctgacgcaaagagtcagaggtttggctccgcccttaaagtaagggcctacaggcgttccaaaaagcctgaactggtactcctgggagggcttaacgccaatgacagggcctgtggcaaacatatagggcctgaggtagagggtggctccgcttccgaatggaggtacccaggctgcattggccttcaccacctggtccactgcctccaggaatcgctccttcgggaagggcggcatctccagcctcctggccgaatccatcatacgctccgcgttcagatcagggcggaacgtgacaatgcttccatcctcagtggtataagccttaagtccttcaaaaatctcctggcagtactgaaggatgcccgcgcattcattaatcaccacattggggtcagaggtcatcccgccctcgtcccatgctccgtctttataattcgccacatagcgcttgtccgtcggcatataggaaaatccgatatttccccagtccaggtctttcttttccatagtctgttcctccattcgggtagatataagatgtattttgaacacaattataatcgtattaatcctcaaaatcaatgggttccttgcaaatatactatacaattcctgcatatcagccataacctcagccggaattcatacatgcaaaaacactctcaggccgcattgcgaatcccgcaaaactgtgttaagttataaaataggaataaaccaacacaaggagatgtacatacatggccaagaaaaatgcccgcaacacccgcggaaagattgtaaatgcagcatggcagctgttctatgaacagggctatgaagataccacagtggaggaaatcatagaactctcccatacatccaagggatccttttaccactatttcgacggaaaggatgctcttttgagcacgctgagcctgctctttgatgaaaaatacgaagaactcatggatacccttacaccggagatgtcggccatggacaaacttctctttctaaacagcgagctcttcggcatgattgaaaacagcatatccctggacctgctggcccgcctgctctccacccagctggtaaccagcggtgaaaagcacctgctggaccacaaccgcacctactataagctgctccgcagaatcatcgcccagggccaggaatccggcgagctgaatgccgaaaccagtgtcaatgagatggtcaagctttacgccctgtcggaacgcgccctgttatacgactggtgtctgtgcgccggcgaatactccctgcgcaggtacagcgcctcagtcatgcctgcgttcctgagccatttcctgccgtggcggggatgattgcaggggaccggagatgaagcctttatatgtataaaaaatttttcttatatatttttcaattatcgtccagtctatttttattataaat

SEQ ID NO: 3179 - DNA, 28398 bp, Unknown
  gut microbiota DNA sequence
ttctctacagcaccttctccaaaaatcctctggctctgtcgctcttgggattcttaaagaactcatccgggttggcgtcctccactatctgcccgtcatctataaaacagatgcggtccgatacctccctggcaaatcccatctcatgggttaccagggccatggtaatgcctgtatgagccaggttcttaatgacctccagaacctcctttaccatctccgggtccagggcgctggtgggttcatcaaacagcataatctgcggctccatggccagggccctggctatggcaattctctgcttctggccgccggacagctttccaggataggcgtccgccttctccaccagacccaccagtttcagaagctccagggcgttttccgctgccttgtcctttggtatcttgttcaccttcaccggggcataggtcatattttccatgaccgtcatatggggaaacaggttaaaatgctggaacaccatgccgatattctttctgacagcctggatatcagcctttggaaccgtaatatccgtaccgtctatgaacacctgacccttggtgggcttttctaacaggttgatgcatcttaagatggtggacttaccggatcctgagggaccaatcagcgtaaccacctggcccttctcaatattcaggttaatcccctttaatacttccaggttaccgaagcttttatgcacatcacgaaactctatcacttctgttcacccacctttccagacggctggcaactgccgacaatatcatgacaaatacgtaataaataaccgcaatgaccaggtagggttcaaagaaccggaaggtcaggaccgtaatctggtccgcagcccttaaaagctccaccgcaccaatgtaggacaggatggaagactcctttaacagggcaatggcctcatttaccaggctgggaagtatgtgcttcacagcctgcggaatgatgatgtccttcatcatatccccatagccaatccccagtgacatggacgcctcatactgtcccttgtccacgcccatgattcctccacggaatatttccgagacataggctgcggagttcagtgtaaatgtaaggattccggactgggtggtggtcagtgtgaaacccagcagctgcggcagtccaaaatggacaatacacagctgcaccaagagaggcgttcccctgaaaatggatgtataaaaccttccgaaccatatgagaggtttatatttgctgattttaacaagagccagtacgatgcccagcaaaaaccccagcacggcgcagattgccgtaatcttcagggtgagcagtgctccatggtataggaatggccagtattgccaaacgctggtaaaatctaatttcatatgtgcagcccctttttacattgccttagtccaggatgaactgttcgcttaaatggcttgcgatgatatcatccagttctccgttttccatcatttccttcagtgtgttgttaaatgtctcatagtaaggggattccttggggaaaccgatggcaaaacagtcatcatccaccttatccataaggctcagcttaagcccctcgttgttctttaagaactctgttgcgcctgcgccgtcaacgatacacgcgtcggccctcttactctttacttcctcgatacaggcagggctgccctggatgccaacggtctccgccccctccacgctctccgctacctgctggtagttggtgccgaacacataggcaatcttcttacccttcagagaatccaaatccgggtaattatcctctgccctgtacacaatggcatttctgggatagaagaagatttcgctgaaatccagtgttttctccctctctgccgtaggcgccataccgccgctgcagaaatcaatctgaccagcctggatagcagccatcaggctcttaaagggcatgtccacaaattccacctggccgccgtttttttccacaacagcctttacaatatcaatattcatacctacataggtcttgcttccgtctgccgccatctcgatggattcaaaaggaacaaaggtagcggaacagcccaccttcacggttttgccggaaaatggattctctgtggcagtgtccgtggaattctctcctgcttcatctgacttctcctcagcgcctgccgccggggtatccgccgcatccttacctgccccgtccttgtccgcagcctcctgtgcggcggcctgagaaacggccgtggtggcatctgccccgccggaacacgcggtgagtgcgcctgctgtcagaacagcgcacagcaatagtgcaatttttttcataataattctcctctctgttatatgtatataaaaataaaaagtctgctttctgcaaaccttatcccttccctctgcctgaccggcattaataaaggaagaacttgcataatcatagcataaatatacatcagattcaatagattccgggcttttttctgcccctgtctatggcctttcccacccttctccccctaattctcactctgtgtcttactccgtaataccagatttatccaacccggcccatgcctttggttgacttaccacctgtccatgttataatgaaaaccagaaatgaataaaaggagcaatttaccatgtcatatgaaatagacggcaggacaaacggacctgctataacctggcccggacgcgccaggattgctgtcatggtcacatttgattttgacgcagaatacctgcgcatgtccagggctgcctccaaaggtaccaccatcggattcacggattattcccggggccagtacggtccccgagaaggtctgaaacggtgtctggatatgctggacacccatgatattaaatccaccttctttgtgccgggaatcgttgcggaaaaatacactgcccaggtggaatccatccatgccagaggccatgaaatcgcctgtcacgggtatatgcatgaatccgtccgcggcatatccgcggaagaagaaactgaaatactggaaaaaagcgaggctatactgaaacgcatcacgggacggcgtcccgtgggacacagggggcctgagagcatcatccatccatttacccctgagctgctggcacagcgcggttacctgtacagttcctccatgaaagactgcgactgggcatatctatgggaaaaggacgggcaggtccttccgctggtggagctgccgtgtgatattaccatggatgactttacctatttttatttcaccttcagcgaccctgccgtgcgctccatgtataccaaccgggaagtattcggaaactggaaggatgagttcgacggccttgtggaagagggaaataaaatctttatcctgaagcttcatccccagatgataggacgcgccagccggattgccgccctgggaaacttcattgcctatatgaagcgccacggcgcctggattaccacctgcgaggaagcggcgcggtatgtactggcacaggcagaagccaatcaggagaatcctgaaaaaggaggtgcagccctatgatgacctggcctgacaacaagcgtatcgctgtcatgatggcatttgatctggacgcagagaccatgtggaccaccagaggcgacggcaaccatgaccatataaccaacttatcccggggcgcatacggccccaagcagggcgtacccagaatcctggacatgctggatgtgtatggggtaaaggcaacctttttcattcccggcgttatagcggaacattatcccctggtggtaaaggaaatcagccgcaggggccatgaaatcggatttcacggatacctccatgaggaatccaccgccacttcctatgaggaggaagatgccaccatgacccgatgcgagaccattataaaggatctgaccggacagtccatagcaggacaccgcggaccgggtggcgtgatacacgattacagcctgagactgtttctggagcacggctacctatacagctccaattggagggactccgacggtccctttatccataccatagacggacgtcaggttcctctggtagagcttcccaaggattctatttttgacgataccgcatacgatttttacacggattctgctccggaacggtatgaactgaaatccccccgggaaatgttagaaatctggaaggatgaatttgattccctggcagcggaaggcaggatgattaactttgtcctccatccacagttcataggacgcgccagcagggtaaacatgctcagtgagcttataggctatatgctgtcccatggggcctggattgataccaaccgggcagtggcggagtatgtgctggaaaaccgggatttattaagacctgacagataaaccttatccccgctttatctgctctgggccaactttcataaaacataacagcaggcgcctcctttcagactcacgtcaaaaggaggcgccctcatgttcagataaccatattcaaataaccaatttcagataagcccatccatatgctcatatcatatacatctcagaacaaggtctgctgctcatactcacaatccctttccagctggggcggttcctggcccagcagttcctttgtctttgcgctgtccagaatccattccctgacctgttccctctcaagaaccagaggcatacggctgtggacaggggccatggacgcattggcctgggtggtcagtataacgaagtgttccccgtcctcatacctgccataaaatcctgccaggaacagaatccggctcccttccttagtgaatgtaaatttctctttattcttattccactcataaaaccaagaaaccgggatcactgcccggcgcatgctcacactgtcccggaacatccgcttttcaaacaccgactctgacctggcattaaaaaccagcccctttccgcccggcccgggatatccccatttctgcctgcagacccgcagactcccgccccggcccgcgtaagaagctgtcccggcgttctttgccggggccggtacattagatgcctcttccagggctgccacaatgaccggcgccgtgtcgcccggatggatgtcccggtccagaactcccagttccagtttccagtccttctgctccgttacgtctcttatctcatctaataactccgcgctgaaatgatatctgccgcacatgaaattcctgcccgcctttcctgagtatttcattcctatggcggcattttgtccgcctactgtattatatacccaaacccttaaaaatcaatgcaggcagtgagcaggaacgcagccaaagctccgttacctcacagcttccagtatcccctcactgaatgtggggtgagggaatataaccttagccatatcctccagcgtcagcccgttggccatagccaccgcaaactggctgatcatatcagtggccctggcacacatcatctgggcgcccaggatgcggtgtgaaccgctgtccgccaccacctttataaatcccctctcctgctgggacagaatggacttgccgttggcagacatgatatacttctttgtcactgcttccattccccgggccttggcctcatctgcgctgattcccacgcagccgatttccggattggtatacacacaggacggaatgatatccgtacggatcaccatatcctctcctgccatatgcgccactgcgtttctgccctgggcagtggctgcatgggccagctgaatgccacccgtcacatcgccaatggcatatatgcccggtacgctggtttcatatttttcatccgtgataatacgcccgcgttccatggccatatccttcacttcccggctgctttcatcggttataagaccgcctgtataagccctgcgtcccgtagcgataaggatgccgtccgccctggcctcgcagggtttgtccttttccgtatagcggcatataagtccttttccatcctctgtctgaaggatctcctccacctttgcccccgtatggatatccacatttcttttcttcataatcattttcaggttctgggcaatttccttatccatggtgggcagaatacggtccagggcctcaataacagtcacaccatggcccagggaactgtatacagacgcaaattccataccgattactccgccgcctataataatcagatgttcaaacatatcctttttgtccagcagaccgtcactggtgaccactcccggcagggatgagcctggtatgggcgggcacgcgggaacggaaccagtggcaatgagaatatggctggtttccagaaccacctggtcctgtttctgtccgcccggttgttcctctgatttcccctccggtttgccttccgattttccctctgatgtatcctcagccgccgccacctttacatgctccctgtccagtatggttcccgtaccgtaataaactgaaatcttgttggtcttcataagggaggcaatgccctttctcagctgttccagcacttcatcctttcgtttctggaccatctccatgtcaaccgcgggttcccggaccgtcaggccgatggatggccctgactgtaattcatggtacagctctgctgtgtggatgattgttttggtgggaatgcatccccggttcaggcaggtgcctcccagctcacggttttccaccagagcgaccttcattccctttttgaccccttcaatggcggcctcatatccgcccggtcccgcgccaatcaccaccaaatcaaatttgtcagccatataaacctaacctctcttccatttatgttctgcgtttacagcgattccctcacaagggtcatgatatcctcttttatccggcatgactgcggttcatccgcacccgtatattcccctgcctgaaacgcgtctgttcccacggcttttaccgccctgcatatatcctcctccgcataggcgcagcccttaagctgttcagccagcattccgatcatctcctggtccatggcgtctgagaatacattcacatcctgtatcatgccttcatccacatgaaactgtatctggatattgccccatggaaaccgtttctccatttcatactcaaagggaattttccttccgtatttccactgccaggaagcaaatttctctgtccgggcatctatgtccggctgaggcagctccccttcctccatccttacggcaggctgaccataaaccttggaaaatgcctccaccaacgccgattttacttcctccaatgtgatatctggcttaaactcgcataaattggccaccctggactttacagaggtcacgcctttggaggccagcttctcttttgatacattcagataccgcgacatattttccttgtccgcccgtatcagtatggttccgtgatggtagcagccgtcccctgttctgtaaaatgcgttgcctgagaacttgcgtccatccaccgtgatatcattacgccccgtcttctcagcatggattcccagactccttacggcttccagtattacatccagctgccgtgaaacatcataatcgccggcgcccacaataaatgtaaaattcagattccccagatcgtggaacaccgcgcctccgccggagagccggcgcactaaatatccgttctcctgttccaggaaattcaccctgcattccctccagcaattctggttctttcctatcaccaccgtatggcggttctgccacagatacagaatgcaggttccctggggaacatgaagggtcatgtattcctccatggccagattccggtaggggtatgtattatctgtctccatccacacaagtctgtttatcatgtcagtctccattctatagaaaggctgcctgggcagccccttccccggccatgtacggatatccgggatatccatacataaccagggacatgccggctgtccaggcagtcctatttcattttcatcattcccatgtatagcgcagtaccggcttacgggccgccgtaacctcatccggtcttccaatcggtgtaaggtggggcgcactgtgaagtgcctcaggatctgccagggcctgctcgtaaatcttatggaatacctcgattgcctcatccagtgtctccctggactctgtctcagtaggctccaccatcagcgcctcatgtacaatcagcgggaagtacatggtcggcggatggatgccgtaatccagaagggccttggcgatatccatggcggatatatccttgtcatgcttcatcttctccagactcatgacaaactcatgcatgcaggtctcgttgtaggccatgtcatagacatccgacagcttcaccctcatatagttggcattcagcactgcattgcgggcagcctccgggatgccctcctttccaagggtcaggatataggacaatgccttaaccaccaccaggaagttgccgtagaacatcttcacatccccaagggaatcctgcgccttcacaaagtggtatgtatcctcttccttttccacacgcacgccaggtataaagggctttaagatttccttgcagcccacaggaccgcttcctggcccgccgcctccgtgaggtgtggagaatgtcttgtgcaggttcagatggaccacgtcaaatcccatgtcacccggccgcacaatgcccataaccgcgttcaggttggcgccgtcataatagcacagtccgcctgcatcatgtacgattttggtaatctccagaatgttcttgtcaaataatcccacggtattggggttggtcagcatcagaccggctgtgtcctcccctaccgctgcctttaactgctccagatccacgcagccgtcctccctggacggaatgctcaccacgtcgtagccgcacatggacgcgctggccggattggttccgtgggcagagtcaggaacaataattttggtacgcttggtgtcattgtgatgtacatggtacgccttgattaaaagcagtcccgtaaactcaccgtgtgcgcctgctgccggctggaatgtcattgcatccatgcccgtgatttcgcagagatatttctccgccagatataaaacttccatggaaccctgcaccgtagcctccggctgcagcggatggactcccctaaacccctttaaagcggctgcttcctcatttaccttgggattgtacttcatggtacaggaacccagaggatagaaaccgtcgttgacaccgtgggaacgctttgccagctccgtataatggcggcttatttcattttccgacatgtgcggaaggcggggctgtttctcacggatatgtgctttttcaaaagatacctgtggcacgtcacagggactgattaaatccagtcttctcccggctgaccctttttcaaatacaagtttcatgaaccgcacacctccttttgtccgcattccctgtgaagcgcctcccgtacagcagaggcaagttcatccatctctttcctggtgttcatctccgtagcgcaccagaggatttccctgtcggaaagcggcagtccgcccaggattcccttgctttccaatgcccttaaaatgtgggcgctgtccgtgcacccgccctcagggcttacggtaacgaactcatggaaaaattcacagttatgctttggctcaagccctgcttcctttaatacatccctgagatagtgggccttggacatgcactggcctgctgccttagccataccgtctgctcccatggctgtcatatatacagaggcggtcagagcgcaccatgcctggttggagcacacgttggagctggccttctcacggcgtatatgctgttcacgggcctggagagtaagaacaaatgcccttcgtccctcatgatcggctgtctcgcctacaatacggcccggaagcttcctggtcatggctgctgtggctgtcataaagcccagataaggtcctccaaacgccagaggcatgccaagaggctggccgtcgcccacagcgatatccgccccgtattctgccggggtcttcataacagccagggccatggggttgcagcccatgatgtacttggcgccggcctcatggacgatgcggcccagggcgtccccgtcctctatattgccgtaatagttgggctgctgcacatagaagcaggcggcctgggggtctgccttcagcatctcttccagagctgccccatccgttaccccgtctttttccggaaccataacaacctttgtattgctgccaaagcagtatgtcttcatgacctcgataacgcccggatttgcagccgcagaaatataggctgtggttttctttctctccttacacatggcaatggcttccgccgcagccgtggcaccgtcgtatatggatgcattggaggcgtccattcctgtgagttcacagagcatggtctgatactcgaatatggactggaggatgccctggctgatttccgcctgataaggcgtataggcagtgacaaactcctcttttgacgtcacgtttgaaacaatggcaggtatgtagtggttataagcccctgcccccctgaaaatatggcggaacacaacattcttaccggctatgtcctccattcttgccttaactgcctgctcgctgagtcctgaagggatattgaccccttccttcagcattacctcatccggtatatgggagaacatctcctcaaagctggcatatccaatctcacgaagcatctcctgctgctcctgcttcgtacctggtacataacttcccatataatctcacctcacctctcatgggatggaataccttccccgccttaatcccctaatccagggtcttcacatattcctcatactctgccgcgctcattaactgcgctgtgccggttacattctccaccttcatgaaccatgcctcataaggcgcctcgttgatggattccggggcgtctaacagtacctcgttgatctcggccactgtgccgcttaccggtgaatacacatcggatacagcctttacggattccacatctgcaaacggctctccctctgtcacctcgtcccctgcttccggcaggtttacgaataccagatccccaagagcgtcctgtgcataatcagacactcccactaaaaccgtgccgtcctccagggtctttacccactcatgtgactttgcatactttaaatcttctggaaaattcattcttaatacctccttgaacatgctgttctttattatattttaaaaacttgtttattatatcccataaattactgccgtttataaaatggcagcttcactacctccgcggccacgcggcgcccgcgcacatccacttccagcgctgtccccggatccttaaaccctatgtcaaccagggccatggctgccggatatcccaggaacgggcagtgtgtgccggaggtggtcatacccacctgctgttctcctatgtaaacaggctggtgctccctgatgatgccgcggccggttacctttaatcccacacgcttcctggtcaaaggtcccttgtcctggatagcctgttttccgatgaaatcatccttatccatcttcacaaagattcccaatccggcttccttgggagaaatagtatcgtccatctcatgtccgtacagaggcatgcctgcttccagcctcagggtatccctggcgcccaaaccacacggaatcaggccctcatcctttcctgcctccatgagcagttcccacatcttaggcgcatcctccggcgccagataaatctccactccgtcctctccggtataaccggttttggaaatgatgcatttcatgccgcccaccatgcggtcaaacaggcaggtatagtatttttcaggaatatcttcctccttcgccacctttttaagcacatccattgcttttggtccctgcagggcaagctgtgccacctgggaggaaatatcatcaaacacaacatcccctgactggtgggccttcatccacgcatagtccttatccttgttggcagcgttcaccacgataaaatagcagtcatccctgaccttatacacaatcaggtcatccaccacgcctccctgttcattgcacatggggctgtatctggcctggccctccgccatgaccgtatagtcattggtcaggagcatgttcagattcttaagggcgtccggtcctttgcaaatcacttcccccatgtgtgacacgtcaaaaagaccgcatttggtacgcactgccatgtgttcctcgataacgcctgtttcgtactgtaccggcagaagataccctgcaaaaggtacgatcttgcccttatacgttacgtgagtgtcgtagagaggtgtttttaacaaaacctcccctgctgtttctgttcccataatcactacctccttcatgaaattgtctggtccttaacaatcatagactatgaaagcgcacgaacaaaagatgttcatgcgctctgtccttggacctgaaagatttggcttcttcggtgctatgctctccagagtatcgtccggtatccggtccttttgcctgagagttttccgcttccccttcggcgctgtgttctgtatgctgataatacacggatacgctgtatcaagcgtattctgtatctttcatacattttggtcagtctctcccgaatccatcttccgatgatataaaattgtccgcaaacgcaaatcccaccggcttgccttgtgctaatcccatactaacacaggcgcgattttcagtcaatagctaaaaagtgtttaaattttaacacatcaatcgcatttttcgccttattttccaaacttattttcacgaatattttacggtttatttagaaaaaatactggtaatctcctatgaagtagtatataatgagcaaaggtgatgaggcgaaggggttcctttggcctcattcttgtatgagtacggttttaggtgagcaaaatcttaagtgaaagaaggtgacaagatgcataagtttatgcggacagtaggattcagtatgtaccagaaaaaacaggatatggcgaagcttttaaagcgtctggtaaaagaagcggagatgaccggccgcctggcggaacaggaaggcagcaggttctgtgaactgcgcacggaagtggcccccggcatgggagttgccatgataggcgagatgagccccaaaggaacattcagccgcgagtattactttccctatgtcaagaacccggatgtaagttcagaggcggaatgttccatccagcgccacacggagcgtgaaacttatgcaggccttcttgatgaatacagggtgggcatatccctgatcttctacatggaaaattccatggagtacaggatgcgccgcagcgcccgccagcctgtccagccaaagggagccgcccttacaggactggcagtccagggtaaggtgctgctgcctgtcaataagacggaaaaacaggcagaggactcccgtcaggccgccaaaaaacgcagcagtctcctggaagccgcaaaacacggcgatgaggacgccattgagacgctgaccatagaggacatcgacctctattccatggtatccagacggattgcccatgaagatgtgtactccatcatagagacatgtttcatgccctgcggcatagagtgcgaccagtactccgtcataggggaaatcacggaaatcagcaccagcgccaaccggattaccaaggaagaaatatataacctgaagctggactgcaacgatatggtattccatgtggccatcaacaaacaggacctgttaggcgagccacggataggacggcgctttaagggacaggtgtggatgcagggtacggtactgttttaaagggatgtttcaacgggatgtttatttgaaaataggacttgattttttttaccacttaggttattatataaggcggaccgcatgagtatcatacggcccgccttatatttgtgtttctgtagctcagcaggatagagcgtccgcctcctaagcggaaggccagcggttcgaatccgctcaggaacactggatacagagccgaaagcctggtttactgggttttcggcttttttgtttttgtcgaacgattagcatctttttatcagccacattccccgcggttccttatacttaaattatacaggaagctattttgcaagtcttttcgtgtaccgaaccatcatgtatatcacaaaaactgcaatcacaatctctgttaccggcatagaaaaccaaataaaatcagccttggccaccgttggcagcagcataatcagcgctccgctaatcaccagcccgcggccaacggaaacaacaaacgacgcagccggcttcatcagggattgaaaataataagttgaaaatatattaagcgggagcagcagaaacgaaataccataacaccgcatgatggaaggagctatctgcagcacctcttctgtcggtttcataaaaatacggacaaaaccatttggaaccagcaccaccaatgttgtccagaagatcccaaaaaaggctaccgtacccaaagcatacttcagtgtttctttcatacgcccccagtgttctgccccgtaattaatggaaaaaataggctgggaagcctgccccacactgtatgcgcagcactggacaaacatactgatattcacgatcagaccataaacggaaagggcgtctgttcccagataccggacaatttgccggttaaacagcattgtcatgattcccactgccaagtcaacaaaaaatgttgaaaatcctgttgtcaagatgccctttactttaataaataaatagtgaatactcacaaatttaagtgtgcagcgttttgagaaaaagtgagtcagcataatcagcagcgtaatacacgcgcccgccgcggttgcaaggccagcccccaaaatccccatgtccatggcaaagacaaagaaatagtcaccaaaaacattaaaaataccaccgccaaggaccgccgcggttgcaaggccgggtgcgttgtcattccgaagaaacgccgccagcatctggttgaaaacaaagacaggaataacgatcttaatcgggaacaaataggcttttgtcaatggcagaagtgtttgttccgcgccaaacagccgaagcaaaggctctccaaagaaaacaataccagtccaagcaatcgcggcaagggcggctgtgcccaggagcgccgtggaaaaaaactcgttacagcagccattttcccgccgtcctttttctaaactataaaggacagatccgccgattcccataaacagccccagactgtaaataatattaaagattggcattacaacagacatggccgctgttcctgacggcccgtgatattggccgaccatagccatatccacaagtccataaacagaagatatacacgcgctgccaaaagcagcgccaagatatttcaggtagagcggcttaatttttccagttaacaaattcatttatgtttcctcctttaagcataaaaatagccggataagagaccgaacatagacagttttcttatccggctgtgccatacgtgaccgcagccctccgaaaaaaccactatatccgacatcttatccggccttatactacgattataagtcctccgatgaacatgaggtatgataccttatataaaagaaaatgtcaatcgggtttttaaatcttaaaaaatccagaccttaggcatggacggaagcgaaaaaaagataaccaatatggtagaggccgctgccgctaaggttgtcaccgcaaaaagcgagggagaatgacatcctgttactgctgcatcgtataacggcctccccaactgccttttttttgcggctgatataagtataccatattggcctgatccattgccggaacaattataattgcatccatgaattgaccttgctcccggctttttttgctttttaccgtaccccttcggcatatcagacatatattatcataaaagcattaaccgaggaccattgtatatgaataacaataatccctactctgtaccatcacttaagatgacccaggtagaagacccgattgatccaggtttcacatatcctgataccgatgtagtaattccatctcctgacgatgaaatcgaccctgatttttccgttatgccaccctactacccggactaccctgtacgtccggactatcctgtacgccctaattatcctgtacggcccaattatcccatcccctgcgtgttctgcaacaataaccagtggattcgcggcggaatacgcctgttaaacgccgccaccggatataacccatttaccgtgtatatagataaccaggctgttttctccggactggatttttctgaagtgacccagtaccgccaactgtcccagggctatcatacattctccattatgggctccaacggttacgtatatctccgcaaatccatgtatgtgggtgacggaatggccaccatcgccattgtcaactcctccacgggcctggacctggtatccatccgtgatacggcatgccccacggactggacctcttcctgcttccgggtctgcaatttagcctattacagcggaccagtcaatgcctccctgggcaatatctattttaactcagtaaactttgccgatgcagccagcttcagccggctcagctccggtaactataccctgcgtgtggcccgctccgcccgcccggaaaacaccctggttaccacgccggtaacattaaatccatcccggatttataccctgtatgtgttaaactggaatccctccgcggataccatccagacacttctggtagaagaccggagaagttagtcagtaatcatgagggagcagcataaattaatgcggctccctccttattttcctcttatttaccaccttaatttcggatgaaagcctgtgtttacggctctgtttgtgataaaatagtacaggacacagagccatacagaaaggaaaacctgccaatgatacgctatggaaccataggaaccaactttatcgtggaccgtttccaggaagccgcaatggaaaatcccagccttcattacagtgctgtctattccagaaatcaggaaacagccggaaacttcgcagcaaaatacggggttgaaacaacatacacggatctgaatgcctttgcctgcgctgatgacctggacgctgtctatattgccagcccaaacagcttccactatgaacaggccgcacttttattatcccatggaaagcatgttctgtgcgaaaagcctgttacctccaatgccagggaactggaacacctgattcagctggccggccaaaacaacgtgattttattggaagccatccgcagcatctttacgcccggctaccaggccctggcaaaacatcttcccaaactgggaaccatccgcagggccagcttccatttctgccagtattcttcgcgctatgacaagttcaaatccggaattgtggaaaacgcatttaaccccatcttttccaacggtgcgcttatggatataggcgtttactgcgtacatccccttgtgcgcctgtttggaatgccggaaaaaatcaaaacagacgccgtcctcctggaaaacggcattgacggatccgggacaatccttggcgtgtacaaggatatgcaggctgaactggtgtattccaaaatcagcagcagccgtattcccagccagattcagggtgaaaacggcaccattaccatcgaaggaatcgaccacccccaccagcttattttttatgacagagcaggcggcagacaggtcctgtaccagggtcctgccaaggcggacatgtccggtgagatagcggagtggctccgccttatatcagcgggacccggcagcaatatacataaccggtattccctgatggcccttcaggtcatggacgaggccagaaagcagatgggaattgtgtttccggcggatgaaacctttgcctgatattacattttatccggcagataatacatggttttgcaggcggatgatacacagtttgcaggcagatgatacacagttttctcttgtgcgaaaccccaattcgtcgtatactataaaataatgcgaaaattcaggaggatacagtatggacaagattaagatgaccaccccgattgttgagatggacggcgatgagatgactcgaattctctggcagatgatcaaagacgacctgctgctgccatacatagatttaaagacagagtactatgaccttggactggaatacagggatgagaccaacgaccaggtaaccgttgattccgccaatgccaccaaaaagtacggcgtggctgttaaatgtgccaccatcacccccaacgccgcccgcgtggaggaataccacctgaaggaaatgtggaagagccccaacggaaccatccgcgccatcctggacggaaccgtgttccgcgcccctattgtagtaaagggaatcgaaccatgtgttaagaactggaagaaacccatcaccattgccagacatgcctacggcgatgtctacaagggttctgaaatgaagataccgggtccgggaaaggtggagctggtttacacggccggggatggttccgagagccgggaactggttcacgacttcacctgtccgggcatcgtacagggcatgcacaatatcaatcaatccattgaaagctttgccagaagctgcttcaactatgccctggatacaaaacaggacctctggttcgccaccaaggataccatttccaaaaaatacgaccataccttcaaggatatcttccaggaaattttcgacagcgagtatgctgaaaaatttgaagctgccggcatcacctatttctacaccctgattgacgacgccgtagcccgtgtcatgaaatccgagggcggttacatctgggcctgcaagaactacgacggcgacgtcatgagcgacatgatatcctctgctttcggctccctggctatgatgacctctgtcctggtatccccggacggcaactatgaatacgaggcagcccacggaaccgtacagcgccactactacaagcacttaaagggtgaggagacctccaccaactccgtggcaaccatctttgcctggaccggcgcactgcgcaagcgcggcgagctggacggcaacaacgagctgatggaatttgctgacaggctggaaaaggccaccattgacaccattgagaacggcgagatgacaaaagacctggctctgattaccaccattccaaatccagttgtacttaacagcggggactttattaaggctgttgctaagaggctgtaaaacactgataaaaaatggctggtccatctgtggttttttccacaggaccagccgcttttttgtctcttatcttccactgtgtgcttttatttccaatgctgctagttcatctgcagcctctcaatctcactgtcaatcaactccatctcttcccctgtaagctcccaatcaaatgtggcacaattttcatatgcctgctgcgggtcgcgtaccccacagatagcggtggaaacgtaactcttttgcgtactccaattaattgcaatctgagctaagggtttgttcctgacctgagctatcttgtccattaccttcagaagttccatgattttagagaacttagggtttttaaagtaatcgtagaatgtgtatctgaagtcattctcttcccaatcaggaagttcacgtatcgctccggtcagaataccagcccccaaagatccatatgtcatggttccgattccctgtgtctcacaccaagccagcagttccttctggctttcttccaccatactgtaaggcggctggaggaaatcaatcctgactaccttttgggcttcttcaattagatttctgtcaaagttagaaacaccaataaatcgtatttttccactcttctttaaatccaccaacgccctcatagttacttcaacaggcgtggccggatccggccaatgcataatatatatgtcaatatgatccgtgttcaggcgtttcaatgactgttcacattcccatatggcattttcataagatccattgttaatgacagatccattttcatcattgcttatactaaatttagttgccagaaacaccttctcccggtatccattctccaacgcctttcccacaacttcctcggaatgtccattgccataaatgggagccgtatccaccagattgacacctccatcaatcatagcgcgtatggcgtctatggaatctttttcatttacatccccccattgttgtccgccgatagcccaggttccgactgccagcgctgaaatgtcaatgcctgcattcccaacatgtttatacctcatactattctcctccatttcaatctgttatggtctttcctatatcccttatggcttcatggaactccttagattctgttacaatacatacgggctttctaaaatcaatggcgtacatacctatgtagcttttagcatcaattataatactgccgtcttctgaatgaatacccacaggttccgggcatacactggccagacgctgaatctgctgtatttcattaattgtactgaacattttttttgttatcatcgaaactctctccctaaaaattcacattcagtggtgtacagacttctgctactcctgaagcagagacaagtatgatattagaatccggcatcagttccccagtcctgatgaaaacaagggattgacgcgaccgttctatgaacgactcaaaatccagattttcctgttcctgctttatcattattttttgaacctgttgtaaaccctgcggattgtaaatttccatatggtcaaccacaatgaatttttcaacaattatctcattcagaaccgctttcaatgtgtcaaagaacgacggaatacctgcagttaatgataaatcaattatatcttctccttttggtataggaaaacctgcatcacatatggtaatcatatgtccatgccttgccagagtaagtgctttcattaactccgcattgatgattcccgattttttcatgctgaacctccccttgtcttaataccattgctgaccagttccagatattgtctgtatttcagctcatacctgtcactgatatcctttgagggctcataggaatcccgtatatgcagcatgcttcgggctgctgatttaatatcctgatacaactccacttttactgctgccagcaatgctgccccaacagatgatacctctatattctgcattcgttccaccctgcatccccaaatatccgctctcagctgcatccacttttcagaacgggcagcgcctccgcccacccacactttatcgcaactccccttctttattttcttacatccctccaatattcgtctggattcaaaggtaagggactcaatcatggattcaaataaatcctcttttgtctttgtcaggcccagtccgtatattccgcccaggttcccggaaaaatgcggattgaacataagggaactgtctcctctgaattcagcgtgtttccacatcatgtcatatgctgccggagagcagtcatctaatatttctctcataaaccattccagaacagcccctgatgtaggaaacgcccccagacatacactggtatctataagcggaccacaatatgaaaatatttccgcttccaggttctctgtacctgcatttacaaatccctgctctataaagcccagatggtcatatgtacccgttatatcaccaattattccagaatccggaatacctgcgcctgcaccgtacataccgcagtcacaatcatgactgccaactataacgggaagcgtaaatggcagcgctatttcaccgtacttgtcaatatggccgatgatttcagttgatgggaccacctcccccaattgctctgccttaatacccaggaaagaaagaatcggttttgaccattctttactcttgatatcaaacatcattttacggcaggccatggtataatcattcagtggttttaatcccaaattctggtttatccattgttgattcgtataaaaataagatgttttctcaaacaattcaggcttatgctttttaaaccataacaactttggtcccgtgcaaaatgtaacgcaggttccgccggtgatgccaataaattcttcatccgtaaagcggctcccaaattcccccaacgcctcttcagtacctctcacatcaaatgccaggataatattggttagtggtgctccgtggctgtctgccagcataatattatctccaaagtaagaaaatgtaatggcatgaagctctacattttccataatgtccaggacctccttaacacactgtacagaagcctgccacaattcatggggattaatttccgtatacccatcctttggtgaaagcattgcgtatttgcgggatttggagtacagtatctgaccgtcccaaacatgtactacatttacatgaacattggaagtgccgaaatcaactaccagaattgaatcccgtttcattttatcccccctctaattcaccacgtgaagccactggccggtcgtaaaataatgccttaatgtgtgttccataatatcaaatgtcagttcatcggaattagatgctgttcctgcaatatggggtgtaagtgtaacattatccattttcagatatggactgtccgggcctaacggttcctcatggaatacatccaacgctgctcccccgattttgtgattctcaagagcatccagaaggcaggactcatccacaagaccggcccttgcagtgttaactaaaaatgcatggggtttcatccttgcaaactgttctctcccaatcatattcttggtttccggagtaaggcggtaatggattgatattacatcagactgttcgcataactcatttagttccatgggaatataaccatcgcctcttattttatcatccggagtataggggtcgtaaaccaggatatttgctccaaaacctgccatcattttagctaccctggttccaatggttccataaccaaccagtccaatattccgtttgcccaaggttgtggcatagtctgaattataataacgattttcccaaatccccttcatcatatttgcatgggacctggcaatattctttgtctccgcgcatatcatgcctaccgtgaattcagataccacaactgccagtcttcctggcgcattggacaccttcacacctttttttgaagctgataacagattgacattttccacaccgcttcgtagaacacagatggtttccagatgccgggctccctcaattgcctttgtgctgataggggaaaaatggctgattacaatatccgcatccttcattttgcgtaccatttcttcattaacaggaagagcatccggccctttagtctcaaatgtcagaaaacggttcataaattcatccttgctgatatcgtgggcatcctgaactacatcaagctccacatcgtattccttcagaaaatcatattttctaactgcctcctcgtccatggaaaaatcctgtattatcaatactctctttttgttcattctattggtctccttctcaaattaacgcttatgtctgataactgccacaaatccaactgcaaaaattaacactgcaccctggataatatccttgaggaaaaaggacgcgccaaccatagtcagtccattggatattactgccagaagaatggaacccaatatggtgcccagtatgttaaatactccgggccttaaaaaggtcgctcccagcatacatgtactcatagccggcaaaaagttggaatctcccatagaaggagtcacattgctcagcatggatgcctgaatgatacccgcaaagcctgcaaacatcgaacataccacaaatgcaatcctgcggttacgtcttatattaattcccacatgctgtgctgctacagggttggcccctactgcatagatgtaacggccggttttagtcttttccataaatacaaaggctatgattgtgcataaagctaacaatataactgaaaccgggatgattcccaatacaaatccctgtcccaggatagaaaaccctgaaggccagctggtagagtaatattgtccgccgcctgtaagaaatttacatattcctaccatcaaagtagatacgccaaacgtagcaacaaatgcctgcattcctatgttaattactatgtatgaattaaacagaccgatacaggccaccactatcatggtaagcagaaatgcaatataaaaattcggtattaattcgaccatgatcttagctatggcgcaggcccctacggtcgcctctgcacctatggcaaaatcaaagtcacctgttgactggacaatagtcagtcctattcccataatgccaatgatggaagccgccctgaaaatatccaggatattggtcacctttaggaagctgggagatgcaattgcaaacataactgaaacaagtatggttgcaatcagcagaaagtattttcccataacctccagcatcatggctttttcaaaagaatttgtggattttttctttttattctccattttcatttcctcctgaagttctgaaagcagcctccaatattttctgcttgtcaaactggtctcttgtaaattcttcaacaatatcaccaaatgcaaagacgtagacccggttacatacactgaacagctcgtctatttcagaggtgatgaaaataacccctttctgatgtttttctgccaaatccctggctttcagatatacatcatgtttcgcacccaaatccagaccatttgtaggctcatctaaaataatcaaggaacaattctcaactgcaatggaacgtccaattataatcttttgtatattacccccactcaactgacttatcatctgatctttactggaatatctcactccgttggcttccaggactctgctggaaaactcataagcacttttatcattgacaattccaaacttatttgaaaatttgttcaaaaaaagaatctcaatgttatcaatcagactgtaggttttaaacataccatgggccctagcctcaggcgtcatgattagtccttttctaatcatcccatgagtcgttatattttcaacttttttaccatgcagctccacatcaccagactccatgggactaataccaaaaattgcgttggcacattcagttcttccagaacctaccaatccataaaatcccactacttcacctgaatcaacccggaaatttaaatgatgttttgcgccatcgtatgtacagtcccctaccctgagtatggttttacaatcctgcggcttatctttaatttgaatcggctctacatttccattcttaagcattgcacgtatacattcttcttttgtagtctcatccttcctgactgtcattacctttacgccttctgtaaagacagtaatcctgtccgccacctgaaatacttcgtctaatttatgggaaataaatatgatggatatatccatggacttttttatctttgttatgaaatttaaaaacggctttatttccttctctcccaaagaagctgtaggttcatccaaaatcagaagcttgggattcgtagaaaatgccctcactatttcgatagactgctgcacgcccgcgctgagatgccctaccggcatatccagaggaatatcaatacctaattcatctctgattttataagcagtggcccgtatctccttttcatccaggatgacacccattttggtaatctcatttcccagcatgatattctgcgcacctgtaagatgggggataaggtttctctcctgatataccatattaatgccagctgccatggcctctgttgtagtcctgtaactaaccttattccccatgaagataatgtctccccgatccggctggtatagccctgtcagcagcttgcaaagtgtgctttttcctgcaccattttccccgatgattgcatgtacttcttgtctgtgtacatcaaagcttacattatttgtcgcaatcgtgccgggaaacgctttataaagccctcttgtttccaatactatatctgtattgcctgccaaagtgtttccctcctcctcgctgtaagcactgagcagtggtcttttggctgcttagtgcagtggcctgttatcatgccgggaggaattcctcccggcatctaaccgtcgctatatcctattatttatctgcaatcatataaattccaggtccgtcattccagttgtaccatgcttccggatcttcagggtcacccccataaaaatcaaatacagaatgtatactctgattcggtgcaggtacatgatcctgatctataatttttccgttggaatagatggtttcaccaaaggcagtgatactgcatccttcgtcaccgggtttaagtccctgtacctgaagttcttccacaaggttacagatcttatgacagtaaagctcggtgggttgtgcgtaggaatacttgaagttaccgcccttacgcatgtgtgaccatgtctcagatccgccatccacaccaataatggccacatctgtaccaccaatagcctgagctgcagcctcatctgccgtgacagctgctccatcatagcttgtaactaaaatatccagttcgttcccatatttctctataaatctcttagtaaagttataggactgctgccccatggactcgctgcctgatgggttaagagattcttcccccaaaagtttcatgccgggatactggtcatagatagccttaatgggatcggttcgttctacgtggacctgaagagaaggggcggtaatgatggcataattggcattccaaagatatttctcacccatgtagtatgcaaactcagctgcagccacaccattgggctggcaggaattggccactacgccgggaaccagctggttatccacattatatacgccgataccattctgacgggcctgtaaaatcaaatccgcaatacctacaatttccatattgtaaataaccactgcatcgacatcctgggtaataagtgtctgcattccggtccgggcctcctccggtttctgtgcattaaaatatacttctgtaagctcccatcccctgtgcggcgcctcgatccgaatctgattgtaagaacgggtacaggattccgcctccagattggagtacagatatccaacctttagaggacggtcctttgccacctttaacggcggaaactcctgctgtgatgcagctgcttcagtctcctttgtttctcctcctgcggacccatcttccgcagcttccggcattccggtctcagatgcttgggccgcttcctgggtcccggttcccactgtaggagtggttgtacatccaaccaataagattgcgctcataataaatgacaatgctctcaaatgtctctttttcatatctatctcctctcttgttaattgcctcaactgtcaatggaccttgtgccaaacagtctgatatgttggattacctgctgttttcctgtttctattgcagcttcatatatgggtccagtaattgtcttcggcggaagtgacttagacacttccacgattttgtctgcaactgcaatggataaatttgtaaaagcattaattttattcatcccgttgctgaccgccgcatggaaatcttctaccgacaatcctgaccctccgtgcatgaccagagggatctctatcatggaacggatttttgccaatctctcaaaatccattttaggtgcttttttgtacacaccatggactgttcctattgatactgccagggcatccacacctgtcagcctcgcaaattccactgcatcctccggttctgtataaagggaaaccgcattttctccttccagactttcatttctgccaacagatccaatctctccctctacctcaacattacatgcatgagccatctctaccactttttttgtaagagcaacattctcttcaaacggaagggcagagccgtcaatcatgattgaagtgcagcctcttttaaccgccagggcacatgcctcaaaacttgcgccatgatcaaaatgaaggcataccggaacctgcgtccggctgattcgatccaccaagtacggataaaaattgtcgtaatccacaggtgcgggaaaatcccctaccatcagtattacgggggttctggtttcttctgccgccaggagtattgactcggcaaacagatggtctgttgcgtcgaatgcccccactgcatatttcccctttattgaatctcttaaaacctccctcaatcctaccagtgacatatttttttatctccttcctttaattattttgaatttgagacgcaaaaaagccaacacgaaaaatattcg

SEQ ID NO: 3180 - DNA, 12085 bp, Unknown
  gut microbiota DNA sequence
gattgtttacggtttgttatccgcagttttaattttcgcatgttccattttccctatatatcacattacttctattattttatttttgcttggattgaatttcgtttatcagtttccatttgcatgggtggtgtgctatttcattatgtttttactcataattattgatactcttaggataattgtcctatctgttttaagtgctatttcaaactaaagcgccttatcgcagtaattatcctattttcattttatgcttggcttcaaagagcaggaggtttctatcatgccgttaccggaaaaacaattttatacgtcggaggattattggaatttgcccaatggagagcgggccgagctgattgatggaaaattttacaacatggccccgccaaaccgtatacaccagaaactagttcagcaattatcccttacgattggaaactatatcacttcccatggtggtgtttgcgaagtctatccggctcccttcgccgtcaacttagattctgacgacaaggactgggtggaacctgatatttctgtgatatgcgacaagaacaaattgacagaccgcggttgcagtggtgcacctgatttcataatagaaatcgtatcacccagtagcagaaaaatggactattccattaaaaatgctttatattctgaatctggtgtacgcgaatactggattgtagaccccgataaagaacggactaccgtatattattacgaggaagatgctgcgcctaccatttatgcctttgagcaaaaaatcactgtggctatctacggaaatctagatatcacagtttcagatcttctttaataacttattgtttatataataaaaaccgcccctgcgccaacaggaacggtcttatagatactattgcaggacatgcccgaaataatatcaggtcacctaaacctacgcatattatatcattcggcaccgcattctgcaatgggtgttctttttatgcttaaaaatactttaaggaaggaaatgataatatgcgtaaggatgttaaacgagtagctatttacatacgtgtttcaacgtatgagcaggcgcaggaggggtattccattgatgaacaaaaggaacggttagtgcaatactgtaaagcaatgggatgggtggtatccgaaatatacatagaccccggattctctggatccaacctggagcgccccgggcttcaaaaactcatagcggagataaaagcttatgatagtgttttagtatacaagcttgaccgcatctcgcgttctcaaaaagacactatgtacctgatagaagatgtttttctgaaaaatgatgttgatttcgtgtcgatgagtgagagctttgataccagcacgccttttggtcgggctgccgtaggacttctcgccacattcgcccaactggaacgcgaaaacatcaaagagcgaatgacaatgggaatgaaagggcgggcaagaaagggatactggaaaggaaccagcaggcccccgataggctatgattacaaagatggtaatttagaggtcaatgactatgaagccatgcagatacgggaactattcactattgctgcaaacggtatccccaacatgccgtacaatgttaaaaatatggcccgttatctctctcaaaaatactcaaacaaatatggcaattggaccgatagcaccggtattacttataccattcaaaataaagtctatattggtatggtcaaatacaaagatgaatatttcccagggaatcacatgcctctgattgacaatgagctattcgagaaagccaatagccgattaaatgcttatctatcctccttcggtgagcatagcacttacacaaagtatatgttatctggattaacagtttgtggtatctgcgggcgcccctactatcgccgtaactcacaaaccaaaataggtggtataaaaaaagaatacggatattattcctgtcaaggccgcaaagcagatataccagttaagtgccaatccaaaatatatcgccaagaagaattggagcaagaagtcattaatcaaatcgaatcattaaaatacagagacttttccacggggaatggcaaaaacgataccgcttctcttcttcaggagatgaaacaaattgattctcgccaggaacggcttattgacttatatagcctcggctctgtatccagagaacaaatagacgataaaataagagaactcaaccagcaacgagaaaaggtaaaagttctcttatctgcacaaaacactttaaaatcagaagaaataatcaaaatgtcaacctgtatacgcaatgtcgactacgctactcaatgcgacatagccggaatgctgatagaaaaggtagtggtagaaggcgaaaacatacgtgtttactggaatttctagcccttgttattctcgaagtaagtatgttaatactttccttccccatggtgtttccctttctttccagtcataattgcatgtatgacttacagccttacacggaagctcccttacccgcgctcctgtcccagtctctgggcaggataaaatccactgtcctaagcagacggtccgtggacgccacctggacccgtatgggctggcccagcttaaatgttttcctggtcatctctcccaccagttcgtaatgctgttcatcaaatatataataatcatccctcagctcgcttatgcggaccagtccttccaccgtgttgggaagctccacatacagcccccagttggtgacgcctgataccacgccgtcaaactcctgcccgataaatctggacatatactcgcactttttaagcttgtccgtctcacgctccgcttcctctgcacggcgctccagagccgatgtctgcatggcgaccccaggcagtatggcttcgtaatggccggccctcttgtctcccagtcctcccttcaggctttcctttatgatacggtgaatctggaggtccggatatcttcggatgggcgaagtaaaatgtgtgtaatacctggcagccaggccaaaatggccggagcacagggtggtgtactttgcctgtttcatggagcgcagggtcagcctggaaagaagcacctcctcaggcgttccctctatcttatccaaaagcttttgtaattccttgggatgaatctccccctgctgaagccggatgaaatatccaaaattatggataaaggttcccagctgcttcatcttctccggatccggattgtcatgggttctgtagaggaagggcagggattgccagaagtaatcctccgccacagtctcattggctgccagcatgaaatcctctatgatttttgtggcagcattgcgctcatatggtttgatctccaggggctttccctgggcatccaggataatcttgctctccggaaagtcaaagtcaatggctccccgtttcttccgcttttccctgagtatgtcagatacctctttcatcagcatgaacatgggcacaaacccctcatactcagccatgacagcttcgtccccgtccgtgacaatggcattcaccgccgtgtatgtcattcgacggtccacatgaatcactgtctccgcgattttgtggtccagcacgtttccctggtcatccagttccatgatgcagcttaaggccaggcggtctgtgccagcgttaagggaacagattccattggacagcttatggggcagcatgggaatcaccctgtccaccagataaacgctggtgccccgctttaatgcctccttgtccaacggacggccttcttttacataatggctcacatccgcaatgtgaactcccaggatataacctccctgtccgttcctgcacagggttactgcatcgtccaggtccttggcgtcctcgccgtcaatggtgaccgtacgcagtccccgtaaatccaggcggccggccaaatcaccggtccagtctgccggcgatgtcaaatcaccaatgccgtaaggtccgtcccaggtttcctcatcccttgtcataccaggcacagccacttcatccggacacccttccacctcgtccatgacctccggcggaaactcctccggcagtccataggcccttacaatggacagtatgtctgttcccggatcattgacatggcccagaatctcagtcactacaccctccggcttatggttcgcgtctccaaactccttaatccgcgccaccaccttatgcccggtgacagcacccatatcgcagccctggggaatgaaaatatccttggaaatcttctggttatccggaatcacaaacccgaagcccttgcttttctggtaatacccaaccacctctttgttggcatgttccagcactttaagcaccgagccttcagccctccggccgcctccccggtcctgggattccaccacaatctggaccctgtccccgtgaagggccgctcctgtcctgtcctcagggataaacacatcctgctccatgccttccacggtcacaaaaccaaaccccttgggatgtccgcaaaatataccgttgacagaaaaaacttccggtttcccatattttcccttcttggaaattccgattctgccctcagataccagatagtccaatacctgtgtcagttcatctctctgtgatttgggaatgcctaaaagcatggccagttcctttgccttcatgggcacgtaggacttgtcgttcatcaccccttccagcatctttgccttctgttccaatatttctttttccatataacctctttcttataaatgtcctgcctgtccgaaaacaggtcaaaacccgcctgaatgaaataaaacacccttatatgaatacaagggtgttttcgtcacttatccttctgttatcttaattaccccatgaccttaagcagcacgttcagggcaatggtaatgagcatgaatgcaatggctccatacctggtaaagtgctccagcgcaccttccatggaacggcctctgttcttactccagtaactgtctgtggagattccgccaattgcgctccccagtccgttggacttaccttcctgcatcaggataaccactgatattgcaacaccaagaattacatatatgattgacaaaataacatgtattactgacatccgcctacacctctccattttcttatagtcaaacaaaaatattttaccatactttgtcctaaaacacaacctgttttcctatatttttataggtaagacattgcaggagcttcattcaggcatcgcatttaaaccgcctgggaacaaatcatggaaaggctgccctcaaagataacatccccgaatccggcaggcacaataaaatgctgtccctttgataccgggatgccgtttacacttccctctccgtccagaatactcacattggcaaagctgtccccataattctccgtccagcagcctgtcatgtctatcttgtccacagtatagtaagcgcaggtcacaagatgttcttttctaccgctgtccgtctccttcacaactgccggcattgcattttggtcctccttaaaaggcgcttctatcacatcaatgctctcctttatatggagctgcctgggcttcccgccggacagcctgtcgtagtcataaacgcggtatgtaatatcactgctctgctgggtctccaacaccagggtgccgccctttatggcatggacgcatccgggattaatctgaaaaaagtctcccttactgacaggaatttcccgtatgaaatccttccagcgtttttcctctatcatctgctttacttcatccttattgcctgcatggtgcccaatcacaatggtggcatccggatcgcagtccaggatataccagcattctgtcttgcccagagatccgttttcatgctccccggcgtaggcattatccggatgaacctgtatgcttaagtcgttcctggcatcaataatctttaccagcaatggaaattccttatgacagcctgccgcagccccaaaccactcagggtggctctcccacaaggagcttaagctctgtcctttccatgttccgcctgcaatacggcaatccccgttcttatgcgcgctgatagcccagcactcgcctgtgcggctgcttgggatatcgtaaccaaacacatctttaagacgtgttcctccccagatggcctccttaaaaacaggttccataaatagtaattctctcatgtctctctccttatttttcccctttttgatgcaatcaatgcatcttcttacatcataccctgctttttccggttgtcaagatttaaatgggacggggaaaggattttccggacgaatcaccgcccggaagcatcccctttcccatctaccgcactacatctcctgcactgcatctcctgcactgcatctcctgcactgcatctaccgcactgcatctcctgcactgcatctcctacgctgcatctcctgtcattgcaggcccctgtgaagtgcgcagacagcacaaatgcgttttccaatcaccttttaaccttccagattttcctcaatacgcagcaactgattgtatttggccacgcggtcagaacggcagggagcgccggtcttaatttgtcctgcattgacagccactgcaatatccgcaatgatggaatcctctgtctcaccggaacggtgggatataatggtgccgaatccggccctcttagccatttcgatagcctcaaagctttcagacagcgtacctatctgattcaccttcaccagaatggcgtttcctgctcccagctcaatgccctttgacagccgtttcgtattggtgacgaacaaatcatctcctaccagctgaatacgtcctcccagttccttggtcagcattttccagccctcccagtcctcctcctggagtccgtcctctatggaacagatggggaacgcatctacaagacggcggtagtaatccaccatctcctgtgcgctgcgccggatttcctttcccgccatgcggctttctcccgggaacaggtacatgccgctggcttcatcatagagttcactggacgccgcatcaatggcaatcttcatatcggttcccggcttcagtccgctcttttccatggctctcaccagaaattcaagcacagcctcggagtccttaaggtccggtgcaaatccgccctcatcccctactcctgtgctgtagccttcttctttaagaagcttctttaaggtgtgatagacctccgcacacatcctcagacgctccgcaaaacagcaggccccgaacggcataatcatgaattcctgcaaatcaactgtattgtccgcgtgttttcctccgtttagaatgttcatcatgggaacaggcaggacggatgcatggattcctcccagatacctgtaaagaggcatccgaagcccatttgcagcagccctggccacggccatggacacgcccagaatggcattggcccccagctttcccttattctctgttccgtccgcctccagaagcagacggtcgatgtgtctctggtccaatgcgctttcaaagagaactgcttcgctgagcacagtattcacatgctctacagctccccggactcccagtccattgtaccgattcccgccgtcccgaagttccacggcctcgaattttccggtggatgcaccggagggaacggccgccctgccggtggcgcctcctgtcaggcacacttccacctccaccgtaggattccccctggaatccagtatctctctgccggttaccgcctctatctccagttcgtttaccataaaaaaatgacctcctcatatcaatcttatcattgatataaggatagccattttttaacattatatgtatggaatcagtcattttagcaggctcatccatccttaatttatcctggccccatccgcgcccactgtaaatccatccggtgtgaccgcagataccagcatggcccctgacgggtcgcagtaatacagcttatcttcccaggatatccagccggtcttcatatatccctcctggtcaaagaaataccacttgtaattgatatactgccagccgtttgacgtgtaagttccgtctcccttctggtaccaccagccccggtcatccctgagccactggccgttcaccctggtcaggtcttcctctgtaatctcaatatagggagattcctgccattcaccggcattgttcctggaatccatggccctgactttaaaatagtaggtgcctgcctttgggaacttgccggaaaaatcatagctgttttcctttaccgtataggtggctccgatgccgtcctcataagaattgcctccccttcggcacaggcggaccttataattcttagccaggctcatatcgtcccagtgggccaccccgttaccttcatcccacatcagaccgcttacatccagatcctcatcatcctcgtccagcttatccagccttaccaccaggaccatctcttccttatcattcttagtggaactggatacatacttgaccgtatcgccggaaaatgaaaacgcgctctttcccgatttcttaaagtaataatcactgtcagcggaaagccatatctccactttcggcttgtccccgcctacccagctgtcgccctcattgacaatatccacgctctcaatggaacactccccatcctccaggctcacgtccacgtttccgcctatttctcctgcctggatatccgatgtgaaattaagtttaattttccccactggtgtcctttcctcttttgcaaaggctgtaaaggacagggtgcaggccataaacagagctgcacctgccagcacggcatatgctcctcttttcctcatttgaacctcctccttcccgcttgcgtctgttttcctattatagcacatatcatcggcttctgtcatcctccggcacaccaaacttgttccattttcatatagtatagtatgccggggcgttaatggacatccggcctataatgaaacagatatacagggggattgcttttgataaccattagtctttgtatgattgtaaaaaatgaggaggctgttctggaacggctcctaaggaccatgtccactgtggcggatcagattgttattatggataccggctccacggaccggacaaaagaaatcgcagcccgctatacggatgaggtctacgatttcccgtggacggatgatttcgccgctgccaggaacgccgtctgccagaaggcggtgtcggactactggatgtggatggacgcggacgatgtaatggagcctgaacaggctgcccgcttaaaaaatttgaaggaaaccctggacccctctgtggatgtggtgatgatgaaatatctcacgggttttgacgaaaacgggagaacctccttttcctattacagggagcgtatcttaaaaaaccacaagggattccagtggcagggccgggtgcatgaagctgtcccccctgccggcaatatcctatacaccgatattgagattcagcaccggaaggagggcgccggggataaggaccgcaaccttcggatatacgaaaccatgctgagccagggagaacctctggaacccagacaccagttctactacgccagggagctgtattaccacgaacgctatgaagatgcggtacgggtgttcagggtattcctgcaggaaccggatggatgggtggaaaacaagatagacgcctgtctccatctggctctgtgcgaggagcatctgggacatacagaaaaggccgtggaggcacttttaaaaagcttcttatatgacagtccccgcggtgaagcctgctgtgaactggggcggatgaaaatgaaggaagaaaaatacagggaggctgcttattggtatacccaggcattatcctcccggcctgcggaacagacaggcgcttttgtccgaaaggactgttacggcttcctgccttctattcagctgtgtgtatgctatgaccgtctgggcgaccaccgaagagcatggcactatcacttgaagtcacaaaagctgaaacctgaacacccatctgtcaggcagaaccagacctactttgaacacaaactgaaacatccggcggaagggcagccttccgcactataaaataaggagaggtaattatgtattttaatttttccaacggaatgaatcgaaatgataatatagaacaacgcagaccatgcggataccccggaaacaacggttttccaggtaatggcggctgccccggcgactatggtttcccaggttccggaagatacccggaagatgattgccaggacagcgacggctgtggcagcgacagcacagcccagacagataacagatgcccaggtaacggcgggtttccaggcggcaattttccaggcggcgggtttccgggctgctgcccaggacccagaggaccacaggggcctgccgggccaacaggcgctcagggaccaatgggacccagaggatgccccggagcacagggccctaccggaccaactggtgccatggggcctcagggctatgtaggccccaccgggccgacagggcctcagggacccagaggattcaccggtgagacagggcctcagggaccccagggaccaatgggacttcccggaccacagggcatagccggcagcacaggcgctaccggaagccagggaccacaggggcctcagggagttaccggacctgccggacctcagggcatccagggaccacagggagctaccggacctgccggacctcaaggcccccagggacctcaggggccccagggacctcagggcagcaccggagccgcagggcctcagggactgaccggagctaccggacccatcggaccgaccggagcaacgggacctcagggaatccagggcatccaggggccacagggacctcagggagctaccggcgttaccggacctcagggtatcgcaggagcaaccgggccgactggcacgaccgggctgactggcgcaaccgggccgactggtgcaaccgggccgactggtgtgaccggaccaactggcgcgaccgggactgccggtatcacaggggccacgggtgcgaccggcttagccgggaccaccggaccaactggtgccaccggacctacaggcgcagctggtgggattgccgcatacggcggaatgtatagaacaaccacaacgccaatttctatcggtattgcatctacacaacaagtagcttttaataataccatgccattattaaatacaaccgtagctgccaatgctattaccgtagctaataccggtatatatgagattaactggaagttagtatcaacagcatccgtggcagtggcattaactttagctatacgccgtaatagtgttcctattgcatcaaccaccagtacaagaaccttatcacttggtgttgaaagtttatttgaaggcagcgttattttcaatttaactgctggagatgtaatagatatggctttgtcttctgcactggccgtaacattaactttatcaacaggaacaaatgcaacattgacagtaaagcagcttagctgataattgtttaaaacacctttgtgttttaaacagtgtaaattgatgtgattatgctatattttattttatcctcatttatgggacataacaattttcctattatgtacggcctggctgcaccaaaaggaccaattggggcacaaggacctgctggaaccacaggggctgccggcgctaccggccggtagtcaccgcccctagtccgcacgcccggaataccacagctgccctgctcatgtcctcatgtattcttcttaataacgcacccatggcaggaagcatagaagcacccgccgttgcaaccggaaaattctccgtcacccggccggcataacgcaaatatacgctccgtcagttgttcgtttcttcttatggtagatttggtcctgataaacgcgatatgatgtgtcacgtcaagtgaattagggccgaatataccgcaagtggggcatgctttgtcccaaggagacacctacggccgactccttaggtcagatggcgggaatgaattttaagacacgctttaaaacagattcc

SEQ ID NO: 3181 - DNA, 636 bp, Unknown
  gut microbiota DNA sequence
tatcggggatggctccgtgccgctcctaatttcatcagcccgtgttcaccgtaccgggcgttcagcgcgaaggtctgccatacaaggagggaggacgatgccgcgccgaagccgatacatatccactggtcgataccgaccatgtagaggatgacgaacaggacgaagagagccagcagacctccgcagaagatgaagaggtactgtgccttcaagcccttgaactctaccggacggccgatacccttgttgattgggtattcagccatacattatttattaaaggaagaatgagcgcaggatggtggcggcaacaatcaggaagatgcacgcgccgaaccacgaggcggctgtcttgctggtgtcggggtcgcccgatgaaaacttgccgtacacttttacgcccccgataagcccgacgactgcaccgatggcgtatatcagtttagttccggggtcgaaataagaactcaccatagaggtggcttcgttgatgcccgcgatgccgtttccctgcgcgaaagcggaggcggttgcggcgatgacaagtgccgcggagaggattgcttttctgtttttcaagatgttcttgttcataaactgttcttgttttttgccgtcaaaagggtggatggt

SEQ ID NO: 3182 - DNA, 14520 bp, Unknown
  gut microbiota DNA sequence
ctcgtagtcaggtccaagtgtttcttcagatttttttttcaaccaatccacctgcatggtgagctggccaacttttttcgcatattcagctttttccttgcgttctaaagcgagtttttctttcagattatcctctcgtgtgtcattaaaaaccacggatgctttatcgaggaactccttcttccagttgcggagaagattcggctgaatattgttttcggttgcgattgtatttaagtctttttctcctttgagcagttcaatcactaattctgatttgaatttggcagagaaatttcttcttgttcgagacataataataatccttctttctgtagtgtttacagtatatcagattcattaagaaatgtctcttgaagtgtcttaaattacgataccattatagcaattcataactggattcctgaaagctggatccaaagtatactcgggagcaataatccctttggtgttattcttgcaacgcttgtaggcattcccatgtatgctgatatctttggtacaattcccgttgcagaagctttgttagccaaaggggctcagctcggtaccatacttgctttcatgatggctgtcacaaccttaagcctgccgtcgatgattatgttgaaaaaagctgtaaagccaaaactcctgaccctgttcatagtcatatgcactaccggaattattcttgtcggatatctatttaatgtgtttcatgcattttttatataatcaatgaaaggggtaataaaatgcaaaataaaaagacgacaaagctttacgtaataacaggtttcttgggggctggtaagactacgttgctgttaaaactgctagaacacctgaaagggagtagggttggtattatccaaaatgaatttggcaaattggggattgacggcgttatcctgaaaaatgatgatatccatatggttgaaatcaaccgtggttctattttctgctcctgtctgaaactctcctttgtcagcgcactcagtgaaatgacacagcatgattttgactacctgttcgtagaaagctcaggcttgggagatccatccaatgttgaggaaattcttggggccgtcgatgctgtctccggtaaaagttatgatttctgtggtgttatctgcttagttgatgcagttaattttatagatcaactgacagatttagagactgtgtacagacagcttaagcattgccatcttgccgtcattacaaaatctgatctggttaattcatcaaaaatggcagacctggaaaagaaaataagagaaatcaatgcggtctgtaggttaaccacaagcatacaaggtaaaatggattacagttttttagatgatgatttacttttatatcagtgggccgaaagtgaagaaaccaccaatacggaggaggcaaagccaaaaaccttattcatggaaatatacgatgctgtggataagaatcaattagttaaatttctaaatgaaatcattccaagcgtatatagaataaaggggttccttactatcaacgggattgggcggcagcaaattgatgtagtaggcaccaaaattaattttaaagaaagcgtggattccggtaatgcccaattagttttcatctcaaaaatagggccggcaatcattaaaaacatactttcagcatggaatgacaatgtagaagctgaaatgaaattaaaaaattagaggaggtcacagatgaacattaaagtgataggtacgggttgcgaaaaatgcgatgcgctatataaaaatgtccaaaacgcaatcaaagaattggatattgatgcggaaatcgaaaaggtggaagacctaatagatatagttaaattgggagtaatgacttccccctcattaatggtggatggaaaactggttatttctggaagggtcgctaaaatggaggaacttgtcaaactcttccgatagacactttcatacaattttcaaaatggttcctggcgtatctcaccaggaaccattttatataacaatatccaaatattctatagcagctttattattcacatgactatcaccaaaccactaataatgataaaaccgacacgtacactactcttatcagcactttccgtaaaattcatatgcgcgcattctggtttaggcaccagaataatattttatgctttacaaattcaaatatatattttatgactactaccacaaatgctgtaaacattaatccccccaacccactaataccggcccaaagcaaccgataaatattacggccatagatgacaaataaaatgtgggaagatgtgcgataaggtacggtctggctgtccactgtctctttcacgtttctctcaatatcaccacctcaatattcttcccataaagaacaccaaaatcctccatcaatcttgacaaaggtgttacactatggtacacactatacaaggaggtggacaatttggctgtttctaaaaataacataagagtacctataacaatcccaaaagaattaaaacagcagttagacgaactggcaaaagaggataagcgtaccttttccaacttatgcgctaagattctgtctgactatgttgagcaaaaaaaggatggtgagtaatctttgagaatctatatatacagccgtaaatcggtatatacgggcaaaggggaaagcgttgaaaaccagattgaaatgtgcagggagtatatttcagccaaaatccccgaatcagataaggcggaaattgtcgtttatgaagacgaaggcttttctgcaaaaaatacgaacagaccgcaatttcagaaaatgcttcgtgatataaaactaaacaaaccagaatatgttgtttgttaccgccttgaccgtatcagccgtaatgtcagtgacttttcttctctgattgaagacctgaacagctataatatttcatttgtctgtatcaaggaagaatttgacacctcaaagcccatgggaaaggccatgatgtacatagcttcggttttcgcccaactggaaagagaaacgattgcagagcgtgtccgtgacaatatgctaatgctggcaaggaccggacgttggctgggcggcactacccccacaggatttacctctgaaaagatacaggaaatcatcattgacggtaaaatcaagacttcctgcaagctaaaggacaatccggaggaacttaaaaccatcgactgtattctggaaaagttcttagaacttcggagtatatccggagtaagcaaatacctaatcaagcaaggaatcaaatcacgtacagggaaaatattctctctgttagggattaaagaaatactgcaaaatccggtttactgtatcgctgatgaggacgcatgggaatactttacggaacatcattcagacgtttgctttgaaaaaaccgagtgttccaataaatatggtctgctgacatacaataaacgtgattacaggaagaaaaatgccccaaggcagggtatggataaatggattgtagctatcggaaagcataaggggcgtatttccggtaaaaagtgggtagccattcagaacatcctgaaagataacatccccacaggtacgaaaccagctatcatgcataatgactattccctgctgtccggcttaatcttctgcgacaagtgccagagccggatgttcgcaaagcagagaagcggcaaaggcggcaaccgtgaactctactactatatttgtaacaacaaactgcgtggtggtttaaaattatgtgactgtcaaaacctcaatgggcagcaggcggacgatattgtttgtgaatacctcatgcagtacacggatgaaaattccggtatctacaagctgctggaaaagctgaaacaggatttacagggccagacacaaaaaagtcccctatcagtccttgatgataaaatcaccaaatgtaacagcgagatggacaacctgatcaacacactgtcacacggaaacttaggcactgctttcattgaacgtgtaaatgccagaatcatggaactggacaaagaactggcttccatgaaagaagaaaaaaaacgtctgcaaaaggatgtcagcgtcataactgacagggaaatccaagttgacatgctgtccacggcattgtccagcttcaaagacaatttccatacactgacaatcgaagaaaaacgcaccttaatcaagctgatggttaagaaaattgtctgggatggcaaagatctccatatttttatcgacggcgagtagggaactgtcagccctctactcgtcgtatggagcaaagttaccgtttaggtggtggcgcatttcccacactcatcgccatcatctccatgttctttgtgggtgtatccggaggcgcctttgactccatgctgtcagccctgctcctgaccctgtttattgtactgggcgtatgcatgacctttgtggtctccaaagccctttccatgaccgtgttaaagggaattccctcttccttcaccctggagctgcctccttaccggcgtccccagattggcaaggtgattgtccgttccatctttgaccggaccctgttcgtgctggggagggccattgcggtggctgcccctgcgggccttttaatctgggtcatggcaaatgtacaggtaaacggcatcaccctgttagcccattgttccggtttcctggatccctttgcaaggcttcttggaatggacggagtgattctgatggcatttatcctggggcttcctgccaatgaaattgtaattcccatcattatcatggcctacatggcccagggaagccttctggaatttgacagcctggcacagctgagggaattgctggtaaataacggctggacctggattaccgctgtcagtaccatgcttttctccctgatgcactggccctgcaccaccacccttcttactatccgaaaggaatcaggcagttttaagtggacagttatgtccttcctggtgcctacggtctgcggaatcgtgctgtgctttgcctttacagccgtagcccggatgtttgtataaaaagagcttccccgcacatacggcaggaaagcaaaaaggatgggacagcagcacacatattcctgtgctgtgtcccatccttaattatactttatcaatcaaatatcgtgtctgggggattaatacattccgcccatatcaggtgctgccgggcctgccggagccggctccttgatgtttgcaacaacagtctctgttgtcaacagtgtggaagcaacgctggttgcgttctgaagtgcgcttcttgtaacctttacaggatccaggatgcctgcttcaatcatatccacatactcttccttgtaagcgtcaaagccgtggcctacagaggattcttttaccttatttacaataacggagccttccagtcctgcgttggccacgatgtggtacagaggagcctccagagcctttaagatgattctggcgccggtcttctcatcgccttccagtccgtcagcaacactcttcacttctcctgctgcgtgtacataagcagaaccgccgcctgcgatgatgccttcctctacggctgctcttgtggcgttcagcgcatcttccatacgaagcttagcttccttcatctctgtctcggttgcagcgccaacacggataacggctacaccgcctgccagcttagccagacgctcctgcagcttctctctgtcaaaatcagaggtggtttcctcgatctgcttgcgaatctgggatacccttgcggaaatggcatccttgtcgcccatgccgtcaacgatgatggtgttctctttctgaaccttaacggattttgcacgtcctaactgctccatggttgcatccttcagatccaggcccagttcctcagagataacagtgccgcctgtcaggatagcgatatcctgcagcatctctttccttctgtcgccgtagccgggagccttcacagccactacgttgaatgtgcctctcagcttgtttacaatcagggtggtcagtgcttcgccttccacatcctcagcgatgatgagaagtcttgcgcccatcttaacaacctgctccagcagaggaagcagatcctggatgttggagatcttcttatcggtgatcagcacgtatggatcgtctaagttagcttccatcttatccatatctgtgcacatataagcggacaggtaacctctgtcaaactgcataccttcaaccaggtcaagctctgtcttcattgtcttggattcttcaatggtgatgacgccgtccttggaaaccttctccatagcgtctgctaccatggttcccacttcatcatcggaagcagagatggcagctacccttgcaatctgctctttgccgttgatcggcttgctcatcttcttgatagcttccacagctgcatctgtagccttcttcataccttttctcagaacgattgggtttgcgcctgctgccagattcttcatgccttcgtttaccatggcctgagccagaacagttgctgtggtggtaccgtctccggccacatcgttggtcttggaagcaacttccttgatcagctgtgcgcccatgttctcatatggatcctgcagctcgatttcctttgcaatggtaacaccgtcgtttgtaattaacggagcgccgaaggacttatccaggacaacgttgcgtcccttcggtccaagggtcacacgtacggtatctgctaactggttaacgcctgcttccagtgccttgcgggcttctacgccatatttaatctgctttgccatctttcatcaacctccaatattctatgttctactgttttatttattattcaacaactgccaggatatcgttctgctttacgataacgtacttctcatcctcaatctctacttctgttcctgagtacttggagtagattaccttgtcgccggccttaacctgcatggttacttccttgccgtcaataactccgcctggtcccactgcaatgacctctgcctgctgcggcttctctttggctgcccccggaaggacaatgccggacttcgttgtctcttctgcaactaactgctttaacactaccttgtcaaacaatggtactaacttcataattgaattcctccttgctcgatattctgatttttctttcttgatttttttccttactactttcttttgctcacatgatatgttatatcaccagttattagcactgtcaagagttgagtgctaatttcttttaattttattgtttttttacaatttgctgtttctttttttttccattcgtattacaataataacaataaggcataatatgacccataggggagcttttatgcatcaccattacaagaaaggggtttttggcatggcaaagaaaggttggggtaaattcgtggcatttgcagcagtaaccggtgctgtagctgccggcgtttcctacgtacttcagtataagacataccacagggagctggaaaaggatttccgggaattcgaggatggcggcgaggacagaaccgacgaggacgggacagatcgcaccattgatacacgcagcctggaccgcaattacatctctctttcctccagcaaggacgaattcaaggtggctgccaaagatatggcccaggcaacgaagaatgtccttaaggatgccggaagcctgctgtcggacacggcccatgaggcggtttccgctgccgtggacacggctcagattgctctgcagaccgtgaagacaaagaaagcggatttcatggatgagcactccagggataaggatgatgattctgatttgtttgaagatgagggctttctggacgacgactatgtggacgaggacgacctctatgattaccgccgcatggacggcagctcctcctatgattcaggagatcttacggaagatgattacgacgacagcagcgaggagcctgagaaatcggaagcaggccgctctaccgctatcattgaggaagatacactggaataacacagcggtttaggaccatgtaaacgaaccaaaacagtataaaacagaaaaactccgggagcatgacagttcatgttcccgaagttttttggcactttattctgtatttcatttatccgtttactcttttttttcttctttttaactctttttgactcctttattcctcccaggccagaaggttaatccacacaggctggtcagccagcttctcatccatgatgtaggcatggctgtcatcctcctgggacataagctgatactccccacgttcctctatatagatccaacggtcatctaactgtaccgtaccgtcctttacttccagcttccaggtggatgtctctccctcctggttcagggtggtataggttacctctccctccagcctgtcaccggaaaaccttcctgtcttgcacacatccctggcttccccttccgggctggtctcataatagcagtatcctgtatggcccaggccctccatcttcccatccttccacaatccctgggagtaatcatacctgggggcatccagttcaaccacctgaagggccgtacattccccttccggcctgccgcccttaaaggtaccgtaatacagggtcttaggcatggtaaggaccagcccctcaccctccatggactggctgaatgaccggccgtcataaagataccgcgccccatccatgacctcataaaacagagtcacaagctcctcctcaccgctgtccatgacctgggcggcagtctccaaatcccgcgtctctaatgcatttatgattttgtccagaaccgccttctgggattctgtcacatccggaaggatctctgcgtcattccctcccgtccgggccagatcctcccctgcgccttctgccgcctgcgcagcccctgcggtacctggataagccccggccttccccacgggaccgccatcttcatccgccggacctgcctggttatacatccggccataagcgctgcccgccgttcctgcctggtcataggccctgtcatgctgcccccagaaggcactgattcccagtaccgctgcaaaagcagcggcagcagccatatctgtccatgtattattcctgcccttcatggcataccattcctttcctgtcatttttcctgttatattacctgctatattacctgctatattacctgctatattatctgttatttaacctatcatcctgcctgctgtctgaaaaattcatacagcagcttaaaatgtccaggccttactcagtaacttagtgccatttcggatttcctcctcgctgagactggcatatcccagcataacggttgaatcaaacagcttctcctccggctgtatgaagcatcctgatattccataaaccttcactcccagttcagccgcacgggccaccagactttcctccgcctctccctgcctgtgggtcaaaagcacatgcagccctgcatattctcccctgattaaaaaccggtcctccagttccttaagccctgccatcagagcatcatgttttcccttgtacagggctctcatgcggttcaggtgtctctcataatatccctgggttataaactgatagagaatgttctggtcaatcctggacaccgtggaaagatagaaaccggctctttcccggtatgcctccagcaaatgctccggcagcaccatgaatcccacacggatagccggggctatggacttggaaaatgttcccatgtaaatcacacggccgccccggtccattccctgcagcgcgggaatgggctttcccttgtatcggaactcgctgtcataatcatcctctatcagataccggtctgcaccgctgtaagcccaggccagcagctcctgccgccgcttcacaggcatgacaatccctgtgggatactgatgggaaggcatcacataggccacatccgcgctgctgcgggaaagccgctgcacatccattccataccggtccatgtccacgggaatcacaggatatccctcgcccttaagcactctgtatgcctgcttgtatgtggggttttccatggcgattttcctgccgtttcccagaatctgggataggagcatcagcagatactcgcttcctgcgccgatgagtatctgctcaggcctgcagtccacccccctggcggaatggaggtaatcacctatggcagtcctgagagccctttccccctgggggtctcctgccgcaaacatctccttgttatcatccaccagtgtattcctgctgattttcctccacgtattaaagggaaaactgtccagatcaattcctctgggagaaaaatccacctcgtaacggtcctttccggtgtctcccggctctacaaaagaaccgcctcccttttgccgtacttccaccagctcctctatcttgcagacaaaataacccttgcacggcagtgcctctatatacccttcagacagcagctggtcataggccatctgagtggtactgcggctcagcctcaggttcctggccagtatacgggtggaaggcagacggctaccggcctccagctttccctggcggatttcgttttttatgtactggtaaatctgttcatagagaggactttctgactgactgtcaaagggtactatcaattccattttccgccccttcctgccgcaaactggcattatcatttgtatttgaaataaacattctaatcataccagtccaggggagagatgtcaatgtgtttttatttctattctgttaattcgtattattcaagcaaaatacaaagattattcaaagataatatactcttttttctgatttgtatattgtaatcaccacggtatggaattataataaaagtaggaagacaatccaataaaatcagttgagaaaggacggatggacatgagcgaacagactctgaatatgttaaagaagctatctcccaaaaaggaacattcactggctttccgctgtttcataggggctgcggccattgtgctgctgaccgtgtccgtgcacatcctggtgttcacagccatagagaagcacagcgagataaggaaccttccggaatggtaccagctgctggcaggtctgtctgtggatgcgctttacccgctgttcatagtgtccctggcatccatcatcaagcgggtgttccgtataccggtacaccgtctggagcgcaaggttttcaagtttacctatctctgccttggacttatcgccgcctccagaatcagcatgtatgtgggactctatgtattctttatggctttgtttgcggcaggcacagccatatatatcattatcggcatacgttttctctacgaactgtttaaataccgcttcatatcctgccggtattattaaatggcgtactattagattacgcgttatcaggcgatccgtcaccggattatgcatgggatacggtcataacaaatgccggggacctttttcatcaggttccccggcattttctttatcgcattaatgactgctttgatttatctgttattacctcatggttcatcctatttgggaagcttaaatgagctctttaaggatacaatccggttaaacaccggcttctggggtgtgctgtccttgcagtccacacagaagaaaccgttgcgcacaaactgatagctgtcataggcctctccctctgccagggccggctcaacgtagcactcctttaacacaaccagagagttcggatttaagttaaggctgccgtcttcattcagcttgcccttctcctcgtccacaatattctcataaaggcggcactccacctgtcttgctgtgggaacagccacccagtggatggttccctttactttgcgtccctcaaaaccggaaccgctctttgtctccggatcataggtgccgtgtaccacggtaatgttgccgtcagcatccttctcacatcctgtacacttcacgaaatatgcgcccatcaggcgtacctcattgccggggaacatacggaaatactttttaggaggctcttccatgaaatcctcccgctcaatataaagctcccgcccaaacggcaccttcctgtctcccagctccggattctccagattattgggaacatccaacatctccacctgtccttccggataattgtcaatgaccagcttcaccggattcagaatagccatcatacggggcttcttaagctttaagtcctcgcggatacagtattccagcatggcgtagtccacggaactgttggccttggatacgccaaccatctccacgaacatcttgatggcctccggtgtatatccccttctcctcagagccgcgatagacaccagacgcgggtcgtcccagccgtccacgatgttatcctccaccagcttcttgatatagcgcttgccggttatcacattggtcagatacagcttggcgaactcaatctggcgcggcggattctcaaactcgcactccttcaccacccagtcatagagaggcctgtggtcctcaaattccagggtgcagatggaatgggtaatgtgttcaatggcatcctcaatgggatgggcgaaatcatacataggatagatgcaccacttgtcgcctgtgttgtggtgggacatgcgggcaacgcggtagataaccggatccctcatgttgatattaggggaagccatatcaatcttggctctcagcaccttttctccatcctggtactttccctccttcatctcctcaaacagagcaagattctcctccacggaacggttcctgtaagggctctccttgccgggtgtggtaaagtctcccctgtactccctgatctggtcggctgtcaggtcacagacaaacgcctttccctttttaatcaggaatacggcgcactcgtacatctggtcaaaataattggacgcaaagaaaagcctgtcctcgaaatcagctcccagccacttcacgtcatccatgatggactccacgaattcagtcttttcctttgtggggtttgtatcgtcaaaacgcaggttgaacttgccgccgtacttctgtgccaggccgtagttcagtaagatggacttggcatgtccgatgtgcaaataaccgtttggctccggcgggaaacgggtctggacatggtcataaacgccctctgccaggtccttgtcaatctcctgttcaatgaaattcctggagactacctccttttcctcagtttccattacggtatccttgtctgccataattgttcctccgttacgttgctattgtgataaatataattattaatcataacacaattcttttatcagtgaaaggggaaaatacattttgcagtggaaatcttgtcccatgtctgctatactatattaatgtgctaaattatgtactattatgaggagatttaccaaaccatgaaaaaagcagcaaaattcgctctgataaagaccatccccatattcctcggctacctgttcttaggaatcgcctttggcctcctgttgcagaaatccggtttgggtgtgttctgggcctttctcatcagcaccctggtttacgcgggttccatgcagtttgccctggtgggcatcctcaccggcggcctaagctatgtgaccacggctgtcatgaccctctttatcaacagccgccatgcattttacggactcaccttcatcgagcgcttcaaggaaatgagaaagacctatccatatatggtattttctctgacggatgaaacctattccctgttatgttccatggcccgtccggctgactttacagacagtgaatggaaggcagccaccttctttaccgctttttttgatcagtgctactggatagccgggtccgtgttgggcgcccttatgggtgagctgattacctttgacaccacaggcattgattttgccatgaccgccctgtttgtggtcatatgcgtggaccagtggaaggcggccaagacccatataccggctgtcaccggttttatatgcggcgcactgtttctggtgctcatccgctcttccaacttcatccttcctgccctggcagctgccgtagccatgctgctgttcctgcgcaggactgtggaacagaaaatggaggaggattaaaccatgacccaatcaaattatgtactaattaccatactggtttgcgctctgtgcacccaggtaacccgttggcttcccttccttctctttggcggtaaaaaagaagtcccagggctggtccgctacctgggaaccattctcccggccgccatcatggccgtgctggtggtctactgtctgaagggaatcacacctttagcctacccttatggcctgccggagcttatatccgttgccgtggtggtgggactccacctctggaagagaaatacccttgccagcattgcgctgggaacgttgtgctacatgatgctggtacagttggtattctgatgaggccctgaccatgttccggctgtgctcttgccaacccatatataaaagcctgttcacgctttataatgtgtgaacaggcttttctgcatcatttt

SEQ ID NO: 3183 - DNA, 102467 bp, Unknown
  gut microbiota DNA sequence
aaacggacaaagcattgatatcaagcaaacgtgaaatctgccagacaaccagattgaataacagggaagccactgctgcaccaaatcaggattaaccgtattcaaatgctattattactgccgatggaagcctgttattaagaatatgacttcacaaaattttaacaaaaactgctcaatctttgccttttgggctgccataacatcaaaagataacgttggtgtgaatatttgtatgggctttcctatgattttaggttatataaatcgctcattaacaattgtttaattaagcaatcaatgggagccgaactaattttgctgtttcctattaaaagcgcctccaccggtcccatgggacctgctgaaactgcaggggcaaaagatactgctggcccggctggacctgcagccgctaccattagcatgaacgctcagaatactgcagcatcccctctggctatcattataggcaaaatagcaatcccgcttccaaacgaccagtttctcaattgctttacaataaatgctgccaataccatttttacgtttcccgtaaccggcacttactttataacctatcatattaaggcaacagacgctctgctcatgttctggcatattctttaaattaacattcccatggcagataccattgatgccctggctgttgctgcaagccaattctccaggctggaactggagctaaacctaatatcatacgtctggcataatgccatcacttcaggtctaaagacatgaggaatgcaggaataaagcgacaggccttcctgccacaattacccagccgtgccttatattttcggacctgcaccattcattataacaaaaaggagagactaccatgtattataactattcagataatataaatccgcagccttccaactatgacccctcctctgccggctgccgcctcaataacagcggcaatgacaggaacagatgctggtgtgatccgtgcaatccatgcccgccgcccggctgctgcccacaggctggtcccactggccccaccgggcccatgggacctcagggaccaatgggacccagagggtgccccggcgcacctggccccgcaggacccaccggtgccatggggccacagggttatgtaggccccaccggccccactggccccaccggacctcagggggttcccggaataaccggcgctaccggcgctgccggcccaactggtcctcagggcccgcaaggcatacccggacctaccggcccccgtggcgttaccggaactaccggcgctgctgaaacgataactatacgcaacactgttacaagcgaacctgaatctccagccgcagtagtggatataaccggttcccctgaccacatcctggacttctatcttccgcggggagccacaggtgctacaggagctaccggcgctacaggacctgccggtgacacaggagcccgggggattacaggtactaccggtgctacaggagccacgggagcacaaggtattgcaggcattaccggacctaccggcccacagggaccggctggcgccaccggacccacaggaccacaggggcctgccggtgctaccggaccggctggcgctgcaggggccgcaggaaccaccggcgctacgggagccacgggcgctacaggggccaccggtattacgggggccactggtgttaccggggctactggcgcaactggagaagcacaaactataaccatacgcaatactacaacaagtgaacctggtgctgccgccagcgtcacagatataactggcggtcccaaccatgtgctggatttcaccattccacgtggagtcaccgggcctgccggcccccagggcggaacaggagcaactggagctgccggacctgccggggctaccggtgccacaggcgctgccggacctgccggggccactggcgctaccggtgccacaggcgctgccggacctgccgggccaactggcgctaccggcgccaccggtgctatcggcgccaccggcgctacaggggctaccggtaacacggggccagaaggacctgccggaccaactggcgccacaggggccactggagccgcaggagctaccggtgatacgggagcagaggggcccgctggcgctaccggcgccactggcgatataggacccacgggggctaccggtgatatgggaccagaggggcctgccgggcctaccggagaaaccggaccaacaggcgccgcagccaccatcaccatcggaagcgtaaccacaggcgaccccggtaccgaggcatctgtaaccaattccggcacctcagaagatgcagtctttgatttcgtcattccccgcggtgagcccggaggcggcggggctccggaagtcctggcaacagtagatacaacccctcagcccacttcggctaacggggcactgatttttaatgaaactccgctggtatccggaactgccattacccatactgctggttctcctgatgtgcagattaaccagcccggcatctatcaggccttctttaccggtacagtcctgattgatgcagggaccaccatcccctctacactcacggtccagctcacactgaacggagttcccataaccggagcagtggctcgccacaccttcactgcttccaatgaagaagtaaccctttccatgaatgcaccattcccggtaaccggcgctggtactctggaggttgtaaccagcgatgccggatacacctttgaggatgcctccctgaccgttgtccgtctgggagacagcactaatttccgcacagctgtataacaatcaggaaaatgttcactggaaagttaaggccgccggaaaatatccggcggccttacacaatccgcttatatggcagaagcccgaaacattactgcttttctgcacattattttacagcaattgcctcaatctcacagagcacaccctttgggagagtcttgactgccacgcagcttctggctggcttggatacgaaatacgttgcgtacacctcattaaatgtaccaaagtcattcatatcagccaggaaacaggtggtcttaaacaccttgtcaaatccggtgccggctgcctccaggattgctcccacattcttacagctctgctcagcctgggcagcgattccctctgccacggttccgtctgccggatccaccggaatctgtcctgacgtataaacaaccccgtttacctcatatccctgggaataaggcccaatggcacctggcgccttgtcagtactaagaatattcatctgaaatacctccttcatatttataatttggacatacgtccacttaatgttatcgcgttcacattcaactgctccctattatatcagatattatctgccgatgcaatacagatgcttcaatatccccataaaaccctgtaaaggcctgtaaaatacagccctgtccatattttttccctatgccgcgcatcttcatattcaggtcttcataatcagtcgtcccgcctatggacattacgtgtcccatttgttataattgaaatgttttaatcgcattcacatccaacacaccaacaataaaacagaggtatagaaatgacaaatcttaacgataccggggagtctattcccgcataccatattgaccgcaccctatatgagggccgtcccgccgacacatccggccgtgaggataaagaaatccgcacctatgatttgctggattcccttcaggtcccctttgtccgtgtggaccacgacgcccttccaaccattgaagcctgccgcgaggtagaccagcttctgggcacggaaatctgcaagaatcttttcctccgcaatgcccaaaagaccgacttttacctgctgctcatgccaggcaataaaaagttcaagacagctgtcctgtccaagcagattggaagcgcccgcctgtcctttggggaggcagaattcatggagtctttccttgacatcaaacccggatccgtgtctgtcatggggcttatgaatgacagggaaaaacgcgtcaggctgctgattgacaaggatatactggaaagtgagtatttcgcctgccatccctgcatcaacacctccagcttaaagttcacaacccgggatttaatggataaaattctcccggcccttggacatccgcacacagtcgtggatttaccctatgcagaataatccatgtaacagaagagccggcagccacaaaggactgccggctctccctgcattggggtgcattagcctaactatatgcattggggtgcattagcctaacctctagtacttacaatactccttacggattccttccatctcttcatggatggccggaacatccataaccatttccatcattcccacctgttcctcataaacagctggatctgtctcagccttcacttcatcctcacagatatgatatacacttagtcccaactggactcctgccaaaggacctgcataagttggatcgccggctgtaacggtttctgctgcaaggcctgcggcctctgcttcagcagctcccagaagaactactacgttctccgggccgtgctcctcacttatgtttaaaaccctcttctggttttccagatccatggcacctgcggacgttcagacaaagcactctgtggaagagtaggctatctttgcgcctgctgtcttggcacactcttcaatggctggtccgggtacgccgtcgcggtcaccgatgatgatagcatacttgtctttcagtatagccatacattgttcctccttttctttattgcgcttaaaagcgctgtttttatacatcagccgcgtctgcggttatgcatcatttgtatccggcctattggccgtgccctgacatcaggcatatttcctgatcatttcctcgcagccctccggggtggcgtcatcctttaccctggaatcaatcatttccccatccttatatatggcaatcacaggcagtcccagcaccttctgggcaatggcaagccgtctggcctttgtggtgttcagggaacagaattttacagttgttccgtacacctcctcaaacttatggatatggggcataagggctgcacagggaacacagccgtccccgtaaaagtctaccagcacatagccctgggcctttaatacctcttcctcaaaattttccttggtcaaatcaatcatttttaacctcctaaatgtaatcgcgataacttatggttaaatagtttctttatatccatttccaaaaaccgggcttttcaccgtgtttgtccttgacaaaccctggaaaacagataatatattaagttagtagctaataaaattttcatccaatgataaggagtatcactgatgagcgatattaaactgactgagttaacaggttcctgcggcggctgagcgtccaagatagggcctgataccctcgcgcaggttctgcgcggtttaccaacctttcacgacgaccggcttctggttggatatgacacctccgacgatgcggccgtctatcagcttacccctgaacttgccctgatacagaccgtggacatctttccgccggctgtggatgatgcctatgagtacggccagattgccgctgccaactcactgtccgacgtatgggccatgggcggggaagccagactatgcatgaacattctcatgttccctgagcacctgccctttgaaacggttcaggctatcctccggggcggctatgacaaggtggctgaagctgaggccattgtagtgggcggccataccatcaaggatgacatccccaaatatggactgtgcgtctcaggcgtggtccatccggaccgcatcctgcgcaataattccatccaaaagggcgatgttctgattctcaccaaacctctgggcaccggcgttctgaccaatgcggacaggggcggccttttatctgactcagaacataaggccatggttgactgtatggctgcgctgaataagtatgcagccgatgcggtacgaaacctggacggggtccatgcctgcaccgatgtgaccggcttctcactgctgggccacagctatgagatgtgcggggaatccggacttactgtaatcatagacagcagccgcgtccctctgctcccgggtgcggacagctatgcgtccatgggacttgtgcccgcagtggcataccagaatatgaatcacctgaaggataaggtagcgctgccaaaggaccttccgtcccatgtacacgaccttcttttcgatccccagacatccggcggcctcctgtacagtgtggcatcccaggaagcagggcgtatcatggaagcgcttcagaaagcctgccagtccccggctgttatcggacatgtggacgggccatccgcccacccggtcatggtgatttgacaaaattttcacaaaaaggaggcagacctcttatcccagctttacaaaccgggagcggacagcctgcccccttccactctgctacatttagtacatttctaaatatccttacagcagaccaacaggccgctaaggaactttctgaccctcacgttgccgtgtccgtcgctctttcctctgatatagctcatctcccgtttaatctgttccagactgtatagcctggctccatactcgttaaacacaggatctgcataatcatccattcctctgtatgccagattcgccatacccacagaggccgcgcgccgtatgcgctgctccacactcttggaattctgtcccatcctgctgcacagctcacgtaccgtgatgtctcttatgtccaggtcctcctcaatcagatagcggacaatccgtataatatccttgcttcccgcctcgctgagtatacctatttcctgtaagatgctctttaagcgccgtatggactggttataatctgtttccagttcctcgggctgcatctttcgtacccgcacatttgattcccatgaaaatgccccggcggaaaaatcattcctggccttgacaatcatccactgcatggccctggacatctccatattgtgcagcacgtttctaacttctatctcattgaacggtttatgtatcaaaagctcagcgcctttttcataagccatcctgataatatccatatcattgacatgcgaaaggataacaaccgatgtctggggcagtacctccctgattttctgtatgtaagcaatggttttgggtgcggaaagggtaaggtctgccagaatcatatccgggcacatctcctggagctccagataggcttcctcccatctggatgcaatgccggcaacagttcccataccgccatcttcaatcattgttttcagttctgtccgcgaattcctgtcgcagtccacaatatagattctcatcctatttcttctttaagaatacatccttaatatttttccataacatgaacagtatcagtactgcgcccacatatccgttgagcacgtaaatgatgttaaccaggaccctgaaaggaaggaagagtcctacaatcagtccaatcactcccagtgcaaccgtgaggatcttaaactggctggttccctcttttgcgaacctgccgcatggattatacagaagcggcactgctgttgtataaatacctgcaaataccacgactgcaaagaaggatgcaaaaggcttccagatgcgctctgccaggatcagattggggatgtctgcattccatacgaagatgcctgtatttcccagacctgctgtattaatattggcaacctgtgccagcatgataaggacaatggcaacgcatacagcgatggttccgccgtagatgccatactccacgtctttctttttattattggctccaagcgccgccgtaaaactggcaaaccacagaagcacgaatcccgcataggacagggcggatatcacccagttaggtcctgcgttcttgattgtctcactgcccgcctcggcaaatgcacctgtgcggataacttccagtccggctcctacattaccggcatccctgaacagggtaaccacgccgataccgatacacagtacaacgatagccgggccaaccacaccgatcttgtcaaccagtgagttaagtccccctaccacggtaaggattgccagtgctgtcagaaccacgccgcctacccaggaaggaaggccatactgctggttcagtgtagaggcagcacctccaaccataacgaaaaatgacatgtaacaaaatatagtagaataataatccatgaaggtcccaacgtatttaccgcagtaaaacttatatacgtcatttcctttttcaaagtgctcctctgctccggccttggcaaagttgtaattgtagtagatgaagcagaccgcaaacagtaacaccgtaaaaattccctgcaccccgtatgcagtataatactgaataatctcctgtcctgttgcaaacccggaaccaatggtaaatgcgatgactgctccggcaagtataagtacccgtccccagttaactttcttatcactatccatacgccttctcctatccatggtctgatacagcgccgtaacgctgtcctaatttatgccggcgcagcgggcaagctgcctgctgcgccggatttgtcatttctgtattatttctcaaacacagtctggccatcaaccggtgtctgaagtgctttgagagctcttctgaccatggataagcggagtttgtagctgtccttctcgccctgtggcggatcgcccagaggataaggaatgcctataccaggaataatacggttagcgcctattgtcagtgaaatcggaactacagtagccatgtgaactaccggaatgccgtatttctcgatacccttaaccatcgttgcaccgcaacgagtacaggtacctcaggtagagacgaggataaccgcatccacatgctcatcaataaacatctgtccaatctcgctgccgaacttggctgcagatgcagtcgcagttccggtaccggtagtagtgcagaaatagttcacaagctcgccgaactcgcctgctttttccagttctcttaatgcgtctaacggaacaaccacattagggttggccatagcaaactgacggtcatatccgccgtggatggttgtaaattcatccgctgacagacggtccataccggtgatgtcatacttgccccacttggtggcgttggaggactcgatatggtcagggttaccggttggaacgataccgccggaggtaaccactgcaatctttgcgtgcttgatatccttaacaggctcagcaggcgcaactctgtcaaatttaggcataggaaggtctgtgccgtattcctcgccttttaacttcttaaccagcatctcaagggcgcgctcagaacctctcttctcagcgaagtagtttacgcggattcctctctcgatgtatccttcttccttcggtccaaggatttcctcgccggccgccatcttcttaatcagagcggacataacaggaagtacctttggcataccggctgcggagttaggtgtatccacaatgataaggtccttgcggaacatatccacgccaggattctcgatatacataccggtgataaccgggatgcccagacgctcttccactgccttgcagatagtaccgcaggcaacgccgtaacgtccggcattgaatgcagggcctgccacgaatacatcaggctcacatttctttaccatctcaataatggtatcggttgcagcgtccagattctctccgaaatagttgtcaccgcagataatggttgatacgatttcataatcctctcccagtgcagccttaagtcccatacctggtcctacaaccccttcccgaagctcaggggtatagtcggctttttcttcaccgccgattccggcaaagaactggttaatataatgtactattttatatttagccatctttccatctcctttattttcgattaatagcctctagctgccagcttgttgaaaccattggcaatggtggaggcgatgataatctgaagctctgcctcaaagctgccgtccgggttcttacagccgtcccagccgccaatctgcatctcgatgaagtcctgtgttccgatgaccttatccatggccgggaactggagtgtggcattaccctgtccgcaggatgccagtgcgtcagcttcctcgcacacgtcagccagagactgggactttccgtccttgcccgggaactcgtcggtaatcagaactaccttggttcctgcgcgctctaccttacggcagttcatcatcaggtcagtatcaggattgccgtatccctcctcggtaatcagcacaccgtctaatcccatccagttgcacagcttggcaaccatatcggaatgacgctctttgtctgccaggaatacattctcgtttgtcaggataacacccatgaagttgatatccttgccatggtgcttatagcagtcctcaataaccggattgtggaaatgatggtatgtggtaaccttgtcacatggcgcaacacagttaccggaaacaatagcgccgtccatgatttctgttggatacataaaggtggggataaactgctttgcatccacgccgtagtaatatgtatcatgcagaagtccctgtgactgcagcatatggatgtagcctacctttggaaggtccggatacatggcagcctgctcgaaaataggctttgtctcataagtaacaatttcatccggctccagctctcttgctgcctcgcctacataagtcgctacctttaagcctgccatacgggcagccttctcatatacatgagtctccaggccgtcagccggctccactacaacgcagaggttataggtctgtgaaaatgggcagtaatccgcagcagggccgctcatgtcgataacgccctcctggaatcctacgattttaccaacagtcactacacagcagccttccagagcgtgcgttcttccggtgcccacctgaggacttacctttccgatcacgcctgggaaaatctctccgccgctgaccttaacccttggctcaatcacgtccttaaccggtgtaatcctaacggactcacctggctttgcaatgtcaacgtggcagccggtcagcttatcgtcttccagcacaagcttttcaacttcctctttgttgacatagagcactccgtctttcacgtgagtcttgtcatcgaatcggatatctttgataaagatttttcccaattcaagcttcatatgaaatacctccacttctttatattttactgcctgattgtccatgatattcccatatatccaacttggcaatcctgacagtactctttcagttacaaaatttgggatttgtgcaaaaatgatactttaaattagtaatcgcgataacttatgtctataatataacatatgttatcgcgataatcaatggaactgttgatactttttgttacttcttgtaggaatcgactttttcgtcaatttgttataaatttgtcatgttttttgtgtatattcactatttgggtgtaaaatcataggcatagcactgtgtgatttccttactctcctgaatgaactggttcaccagctccggaatctcatcctggctgatgccgtgctcctggacaaacttaaaatatcccagaaacagggtgcatatgatatggttcagctttttagcattttcctcagaaatcttgccctctgccaccagaagcttacatatataatagtccctctggtaatagctgggtatctcaagcatctccttgatgaaggggcttacctgtatgatggcgtccggaaacatctcataatattccttcagggcctctcccaggtcccggtttatattccggtaaaaaacagcctcaaaggcctggggcttcttaaatgcctctttggcataggagcgccatataccgaaatgcacatcccagatatcattccactccttttcacattttgacaaatccaggatatactcgttgagcgcatccagctgggcataaaataaaagctcatccagattctgaaaataccggtacatactggcagaagaacatcccagttccgccgcgatgcgccggatgctgatggcctccactccctccttctttatgatcctgctggcctgaaccacataatccttcctgctcaaatctttaaagtaggatgttcccacattctttttcatgacttcctcacattcggttccttattatccctataatttagggattacattctctatcattgacaaatcaatggtcttgtaatcgtaggcaatcttctcgtcatacttaggcaccttcttaatggcggtccacttattgaaggcctctatggcttcctcaatcagacggatatcccctgcatcactttttccggtttcactgtataaaaggatggtcctatagggcgtctggttgggctttaagctggatgcctggggatgggtcagaagcttgtggtttgtatgaatcaaatccctggtttttaacagtacctcctcgtaagtctccaccataaccacctgctctacgttttctccccatttttctgctgcccggtcattgttggtgaccagaatacatttacctaaatcaaacattgtatcccctcctggttattattatttgctgatttctttaacatctctttaatatattacatcaaattacaaattccgtcaatttatcccgcgcaccataagcctatgctttcccaaattatatatacaaaaatgtaattcctgtaaaaggtgctgcaaagccatcgaaatccatcaattgctgttgcagcaccctgagtcaaaggcaatattattataggtagttccgtgaatactatttactgaaatatccgtgatacagctggaaaaaattgtctgccgtacagccctcaccgccggagaactccaccacatccccgggcagcttcttaagcttcactatgtgctcctttacatacggctcatagattcccaggaacgcctttgtcttcttctcctgggccagcctgctctttctggcagccgtagcctcctcgtcataggcattgacacacttaaggatataatatcttccgccctgctccagaatcccgctgacctggtcctgctccagctcaaatgcagctctttcaaggccatccatatcctttttccattccagcgtcctgtctgtcctgctgtcctttgaatatttggctgcaatagccccaaaatccgctttctctgcctgggccagggccaaaacattctctgcctcagcccttgaatccagctcaatctgctgaatgcctatgaccttagcctccgcgtcgctgacttccagattctcgtttttggtcagctctgccaccagcttatccgcacggtagtattggcagtacaggtcgtagacctcatcctcggatacatccataaacctgcggtcctgttccgacagatttctgtaatattcctgggccagggacttaagagaatccttttcctggcttgtaagctcaattccctgttcgtccgccatcaaattggtggctgccagctcaatcaggaactgctccacctggtccatcagcttgtcctcgaatgtatcaccgttctcgtccgctttgacagaccagagctcactggtatatatattctggtaacggttgcgctccgtaatggcaatcaccatcatctgccccttggtatactccttgtccactgtcctggagccggttgtggcagctgccttccttgaacatcccgtcaaaacagccatcgccaggacggctgccagacacaggcccacggcccctttccatctcttcccccgcaccttgtatatcctgcttctgtccactgtcacactcctctcacagcagccctttcagtatcttgaggactccgccccgcacattgctgtccgcctggaacctggcagcctttcgcacctcttccctggcattggcaactgcaaagctgtaataagcctgattcagcatctctatatcgttgagctgatcgccaaaggccatggtctcctccatcttaatgcccaggctttcctggatggtgcgtacagccttccccttgttcacatccttggccatacagtccatccacatatcaccggcgcaggccatcttagcctggtccttgaactcatcatatatgtccctggtggctgcctcgattccctccttcttataaatggaaatcttcacacacggctcctccagctccagcacatcctttacccggatgacattaaacttatagccgttggtcagccagtcgcacagggtgtcgtccttagaatccagataatccccgttcacgccggcatagaccatctccagttccggatgcatacgtaccttgcgtatgatgcggtgggccagctcacgctccatcgtataggcgtacaggcatctgccatggcatcccacgtacgccccattgttggcaacatagaaaatcttcttcttaaccggttcaaacgcgctttccacactggcccacgggcgcccgctggcaaccacaaactgcattcccttttcacgaagcttcagaatgatgtcaaatacttccggatccaaatccggggatccgtccggtacaagggttccatctacatccgatactataagcttaatcatcttccctgtcctccaaaagtctttttatctcctgatagagacgtcccaccggcagtcccaccacgttggcgtagtccccgtctattccttttatataagcggcaaacctgccctgaatcccgtaagcccccgccttatccaggggttccccgcactgggcatattccttcatttccccgcaggtcatggggtacacatggacatccgtgcgctccgcaaatgtaatcccgtggcacctgtcctccccctggcacagaagcaccgtcacaccggtgtatacctggtgggtcctgccctgaatcttctccagcatctcataggccctcatgggggttcccggtttacccagtatctcatttcccacggaaaccactgtatccgccccaatcaccatggtacccccgggacatcccgacgcaacatcctctgccttctgtctggacagttccatgaccaccctatccggccttttctccctggtctcctcctccatccggctgggcctgatttcaggctccaggccaatctgtgccatcagttccttccgtctgggagacgccgaggccagcacgacctgatatcctccccaagtctgtctcatatccatgtctttctcctttattcaatccgtcacaaaacaccggcgggtcagaacgacgaaaagactgctgcatgtagaccaatggtaacagccacctgcagcagcctttcatccaattaatatatcttcagccggcccactgccggctcatcttcctcttccataccgcccatgcgcaggcggaaacagtggatgaaatccaccagataaaacatggtaagccctactgccaaaacagtccccacatggccgggcagactgatcacggcagcacgaacccttatatccagaaaataaaagaaaaacaggcccagaagtccccatgcaaggctgctttccagacagaccattcctttataattaaagggtttgtggctgtagtcccaccagaaggagccgaacagccgtaccataatattggctgtgaccagttccatggtagtggccatggccatggatgccgtgtagagctccatggggctgccggaaacaggccgcagaagcatgcatgcacccagggcgccgaaaccatatatgacgcaaaaggggccatggccaaagccacggtccactacaggccgcttatattctgcactcagcacaatacattccagcaggtaaccaagaaaactatacataaaaaaccagttgatgaaatcataaatattcatggtatcttctgtccttcctgtctaacatgataccccccgccgtattaataataggaattcagggccaaagccagtccaattcccagtatagcccctgccagaacctgcaaaggcgtgtgtcccacatactccttaagcttctcctgaagtacctccgcattgagcttaagcggattctctgaaaggatggaattcaaaagcttggcctgtttcccggtctcacgcctcactccgatagcatcatacatgacaatcatggagagcacgaaggacacggcaaactcaaaggacccggcaccgtatttgagcagggccgctgtggtcaggccgcagactgtggcggagtgggaactgggcataccgcctgaccccaccaggcgctccgcgttaaaattcttattcaaagcaaagtcaatcagagtctttaagaactgggcaaccacccatcctgtaacagcactcataagaagctgattgccaagcatctgtgtccatacattcataatcggattattctttcccctttcaaacgggctccgggacggttatagcaaatcgttggattaccgtctggccggctgtgcaaacaggcacatccgaatccagtgcttaaaccgggccgtggtttccactgtactgcaatatttatccgcacaagtaactgcatatcctgccttggatgtgggaggtataagggtcaggggccacatatgcctcagaataatcatccgttcctccccggtcagccggaaataccggtccgcgttctccagggctgcctttgggtgggtgaatccatgaaagtactggcccgtctccttagcatgggtatgccaatcgtataaaaacaaatcatggagaagccctgcccgagcagcgcttctccagtttcctcccagctgtttgcacagcttatatccaaggtatgaaacctgtatacagtgggtcttacatgtggtagtcccgtgctgtatgtactggtccatggactggaatacaggatggcacaatatatcctttacacactccatgtactcctggtcttctgttatttctgaaaccattgacggctccatatgggcatcacacctttcttagttcatcagcatattatccgacattacaggtctgttgtcaatatccaatcagccaatcataaagttcctggtatttggcggcagaggtccaccatgaataatccttggccatggccctgtcgattattttattccactcccgccgcttgctgctgtagacatactcagcataacgcacgcttcccagcatctcatgagcattgtaattcgcaaaggagaatcctgtgcccttgccctcgtattcgttataaggctccacggtatccttaaggccgcctgtctcccttacaatgggaaccgtgccgtagcgcagagccatcagctggctcaggccgcatggttcaaacagggacggcatgaggaacgcatcgctggcagcgtatatcttatgggacatagcctctgagtagtaaatctgggcagataccctgtcatgatacttccagtcatagtggcggaacatgttctcatagcgctcctcaccggttcccagaactaccagctgcaaatcgtcgctgcacagctcatccatgacgcactgaatcaggtcaaagcccttctggtccgtaaggcgggagacaatgcccaccatgaacttcttctcgtccaccggaaggcctaactcctgctggagcgccttcttgttctttatcttttccttgcggaaattcttggcattatagttctgggcaatatacgtatcagtctcaggattaaactcatcatagtcaatgccgttgacaattcccctgaggcttccggccctggaacgcataaggccgtccagtccttcgccataaaatggaagctttatctcctctgcatatgtgctgctgactgttgtgatggcatcagcaaatacgataccgccttttaacaggtttccgtccttataggcctccagcttatccggcgtgaaatagtaatccggcagctcggtaaagcgcttgatagtctttacatcccacacgccctggaacttcaggttgtggatggtgattacagacttcatattgcagaaaaactctccctcgcggaacttatccttgagaagaacaggaatcaatcctgtctgccagtcatggcagtgtaccacatcgggctggaatccaatcacaggcagcgctgataaggccgcccggcagaaaaagcagaacttctccagatcccaataccagtccccgtatggctttgcgccattaaaatagctctcattatcaataaagtaaaaggttataccctcatgtacgtactgcaggatgcccacataacggctctgtcccagataatccatatagaagtggtgtacatatttcatcttgtcgcgccactcctgtttgatgcaaaggtacttggggatgatgaccctgacatcaaaatactctttatcaaagcattttggcagggagcctactacgtctgccagtcctcctgttttaataaacggcactgcttctgaagctgcaaatagtattttcttcatcaaaacctccctctcctgacgaacaggttctatatgcctttcctaatagtataccttacttttccgaaattaggaagttgtttctgatgaatttgtcttaaatttttttgtattccaagagtattttatccgatatcagcgcaatgaattcagaattggtaggcttaccctttccggtactgattgtataaccgaaaacttcatcgatggtttccatcttgcctctgccccaggccacctcgatggcatgacgtatagctcgttccacccggctggccgttgtctggttgcgtttggctatggccggatatagaattttcgtcacactgctcatcatttcctggtcttccaccgacatggcgatggcatcccacagatactgatatcctttaatgtgggccggtatgcccagctcatgaagcatctttgtaatgtccgtctccagatgctccttcatgtactcttccctggttatatgggattcttcccccggctcaaaaggagccgttattacttttcctgccggctgtttattgggcagttttccaatatgacgaatcttgtttaccaggatttccttgtcgaagggtttcatcagatagtaattagcgcccgccttaaaggcatcttctgtcatctgttctccacctactgcactaagtataatgaatgcaggatttttcaggaaagtatgctcgcttttcactttttccaccacggatataccgtcaattttcggcattaccaaatccagcagtacaatgtccggcgttgtgtcaacaatcatgttaatggcatcagcgccattgtctgcctttccaattacagataatccgtcttctgcgttaatcagttcatccagcgtattcagaatcagcggattgtcatcgacaatcgcaacattcagcttttccacttccttttacctcctaaaattgtttgcctgtgctgaactacctgccaaaaaatcggtagctgctattcgaccaccttaacatcaaatccatctccttcgtcaatataattcctggcgaaatttattatatatggtccccataccatatagcaacgattcgtggtcgcaattttagacacgcgtcgagattaaattgtatcatttttggtgtcattttgcaattattaattatattgattaacatttctgtaactaacaatcggttttattcctttattttacattaattcgacaccatttttgtaatttcagcacgttgatgtttcaattcattatattctcacaggcacgattatagaacgcaaacatctctatttttcctcctgatatttaaaactttggcaaaatctcaggagggggtgaggcagtatttgtcgatttttgacgagggggtggttttatggcgggggcgcagaaaaatcaggatgatacctgcggctctgtcgtccttctttatcgcctgctccatgagcaggctcccaaggcctttcttttcactatatcctgcccggactcaatgctccatcatattctcaattaaaatcccgtaccctctgctggcatcctgcacaaacacatgggtcactgccccggccagcttcccgtcctggataatcgggctgccgctcattccctgcacgatacctcctgtcagctccaacagctccggatccgtcaccttaatgaccatacttttgttcttatggccggaattatagtccaccttttggatctcaatggcgtaatccttcagctcgccggaaatattgctgcggatataagccggtccctgctttacatcctggcggcaggcgatttccatgggttctcctgatatctgctttttaaactgctggttgaccgtgccgaatatgccctcatttgtgttcttttctatatctcccatatgggactgggggccgtagtaaattacgccggacagcagtcctggttttcccatggatcctttttctattcccatgatttccgtggaatacagggctccgtcggaggattccactagatcgcctgtatcgctgtcgctgattccatggcccagcgcgccgaacctgccgttcatatccacataggtaatggtgccgataccctgggtatcgtccctgacccatgctcccagcttgtactgcccgtcagcgccctggaccggcttcaggcttatatccacgtcctcgccttccctgcgcacctggagcacgcagtcctggccccctgactcgctgacagcccgtatcagatcctcctttgtgttcatgggctttccgttgaacgcttcgatatagtcacctgatttcagtattccgtatgccggttccacctccatgccgtcgcttcccgtgattcgcccggtgccgatgaccatgacgccatccgatttcagatagatgccgatgggtgagccgcagggaatggcatacctggtgtccaccacatccacctgtatgtcctttaattttataactccaaacagcttaagacctacctggtagcttcccttttctcccccgaacatggaaaaatggtccctgccgcttatggtaatctgatctgccggtatattgctctcattggacagggctacctcctggctgtcgctggatatggttgcctttaaaggcaggccaaaggaaaattcctcctcttcattttctataatgctcacccggtccggcactgcctggtccatgtaataccacgtgtaccccgtaacagccacagcggacagccagaaaatgcgccccagccaccggtaaaagattgatttccccttcatcgccctgcctccttatatagtcattcatgttaaatgggtcaatacaaagccatagttcctccatttggggatgaaccacaacaaaaaaaagaaagaagcaacgttcaatgcctctttcttagtattatccatcctcagaatttcaatctgttttattttgttctgtctgccaattccttcatttcacctgcgttcttaagcactgcctccgtaatcctggcgccgcctaacagcctggccagctcttctacggaagcctgcctgtctaacagacggatggtggttatggtcctgccctggctggcagattttgcaatttcaaaatgcgaatccgccatggccgctatctgcggcaggtgggtgatgcaaatgacctgatggctccttgctatgagcatgagcttctccgataccttctgggcggttcgcccgctgataccagtatctatctcgtcaaaaatcagtgtggggatatcatcggaatccgccagcacagttttgatagccagcatgattctggaaagctctcctcctgacgccacatccttaagaggacgcatgggctgtcccggattggttgaaatcaggaactgggccccgtcccatccggatggggtaaaatgatccagtttttcaaattccatgtcaaattccacatccaggaaattcaaatccaccagaccctgcttgattttcttcacaagcgtcctggatgcctttttacgtatccctgttaattgtgtgcagagtttctccaaaccattcctgcattcttctaattcctgctccatacgctttttgtgagcgtcatagtcttccagttctcccagccttttctttttttgttccaatttctggaatatagtctccacggtcggcccgtattttgcctgaaggttatgtatcaggtccaggcgttcctcggttttcctgaatgtttcctcgtccatctccatggaatccagataggatgacatctctcttcccgcgtccctcagaatggaatccgcatcatagagctggtcccggacgccgcccaggctctcatcgtattctgacgcctgctccacctcttttaaagcccttgccagccattccccttccactgcctcgtaggcggcgcccagacactctgcaatgcgcctggaatgggaataacggcggtaagccgaggtaagctcctcctcctccccttccttcagggccgatgcctctatctcctctatctcaaaccggaggaagtcagcctcccggatacggctttcagcatccaaatcaaaccccctcagcttttcttcaagggaacggtatatacggtacctgtctgcaattgtctgttttacaggctgggtcgcggccttgacataggcgtccagaatttcaagatgcttggatttgtaaagcagggactgatgctcatgctgcccgtgtatatccagcagcaggccggtaatctggctcagtctggccatggtcactgtctcatcgttgatacggctgatgctcctggcagaagtcagctttctggatatgattaccagtccgtcctctgtgggttccacatccagctccctgagagccttccgcttttcctcccctgtgacggaaaacactagctcaatataggcgtagtctgccccgggacgtatactgcctttcggtgccttgccgcccagagccatggttacggaaccgatgataatggatttgccggctccggtttcaccggtgaggatattgagaccctcaccgaattccacatccgctttctcaataagggccaggttctttacatgcagttccagtaacatattacaccccttttccgttagtcttccaccattttcttgattttctccatgacaatgatggtatcgtccacactgcgtatggcacacatgatggtatcatcacctgcaatacagcccacgatttcgtggaactggatggcgtccagggcagcagccacagccatggccatgccggatacggtcttgattaccaggatattctgagccatgtccatggacatgtatccgtccttaaggatgcggatatatttgatggcagatgtccccctggggctctccaataccatgtagcgctgtctgccgctctccgactgcatcttggtcagcttcagttcacggatatccctggaaacagttgcctgggtcacattgaaaccagcttcattcagcctttcagccagctcctcctgtgtctctatctcatattttccaattaattcgacaattttgctgtggcgctctaccttcatgtgagacgcttccctccttgttgatttataatgttctgcggaccctgctgtctatattcctccaagatggttgctgaggttctgcataaatgatatctgctttacctttatcatcactgtctgcagctcggaacaccgtatgtctatacagtcccctgcctttaattccatggacgtatccccgtcaaaggatacgacctgaccgctgttaaggaccttgatcctaaccctgtcctccggtgccagcacgatactcctggcattgagggagtgggagcagataggtgtcagcaccatcatcctggcccccggcgctatgaccggccctcccgccgaaagattataggctgtggagcctgtgggcgtggctaccaggacaccgtctgccgcgtattcattgagatactcgtcgttgacatagacgctgtagcgaagcaccttcaggggatcctttctggtaatggcaatttcattgagggcgatatcctttaaaagagtctcttccctccgccatgctgtcccgtgtatcatcatccgccgttccagctggtaacgctcatttaacagggactccaggaccggcgcaatgtcttcctggcggctcacctggttgagatatcccagatggcccctgttcacccccagcatgggaatgttgcggcccgccaggtccctggcagcctgtatgagggtaccatcccctccgattgttatgacgcactccgtatcctccggcacctgggccccgtcaatgtgggctgcccccctggttctctcaggtgtatggtgcaggaggcattctgctccctttgcctccaggtaagccttgatgaacacctgggcctcctgtacatattctttgtcaagattggcaataatataaaaatgtttcatggttatggggctcctgacgtttttatacgttatttatccatttgtgcaaaccgccggccgtttaatccagacatccgtgggcctgttccacaatggcacgggctgacaattcatattctgtttggtttcttttcgcctgatggttttctgtctgcttcatttccgcatgctctgtttttgactgattcatttcttcctgatcggttgttttctctccggctattttctgtacattatcctcatgccccccattttcctgcaaaaaattctggaggtacagaagatattcgatatttccctcaggccccttgatgggagagaattccagccccagtataccaaaaccaatgctccgggcataatccataaccatctctatgacctcaagatgaacgcttttttccctgacaacgcccttctttcccaccttttcccgtccggcctcaaactggggctttatcaggcacaccacctggccttcatcagtcagaagctgttttaccggtcccagcacttttgtcagggatataaaggacacatcaatgctggcaaattcaatgcggtcccctatatcctccggggtcacgtaccggatgtttgttttctccatacagatgaccctgtcgtcattgcgcagcttccaggcaagctgtccatgtcccacgtccacggcatacaccttcaccgccccgttctggagcatacagtccgtaaatccgccggtggaagcccctacgtccatacataccttgcctgccagctgaacgccgaagcggctcatggccttttccagcttaagccctccccggctgacatatttaagggtgtttcccctgacctcaatctgtactgtctcctcaaaggacgtgcccgccttatcttccttctgtccattgacatagactatccctgacataatcagggccttggccttttccctggactccgccaggtttctctggaccataagcacgtccaaccgctctttcttcattaccgttctccttataccgaagcggcatttccccgctgccttccggcttaaggtgcaatgccgcctgtattatctgctatctgtcaatcctttttgccgatataaccgccggccttcatggtccggataatggaatcgctgtcgattcccagtccttcccttaatatggacacattgccatgctccacatatgcgtcaggaatggcaatattaagtacctttacttccggatagttctcatgtatgaatgcagtgaccgccaggccgtaaccgccctggagcacattttcctccatggtaacaatcaggcggtgatttttcgccagacgtgataccattttcctgtcaaagggcttcacaaacctgccgttggcaaggctgcatctgtatccctccgccttcagcttctgccgcacatgttcgcctgtgctgaccatgctgcccacagcgagaagggcaatatcctcttcctcgtaaagtatttcacccacaccgtatgatatgggctgtctgaattccttcagtccccggtacgcctcgcctctgggataacggacagccagagggctgttataatccatggcaaagtccagcatggcccgcagctcccacagattcttgggggccataacgctcatgttgggaatggaggtcaggaaagaatagtcaaagattccctgatgggtctccccgtcgctacccacaagccctgcccggtccactgcaaatagcaccggcaggttctggatacagacatcgtgcaggacctggtcataggccctctgcaggaaggaggaatagaccgccaccacgggcctgagcccggccgcagccatgcctgcagcagacgtgaccgcatgagcctccgcgattcccacatcaaaaaaacggtccggaaacttctttccaaatgcagccagccccgtaccgtcaggcatggcggccgtcactgccaccaattccggatgctcctgccccagctggcagagctttctggagaacacatccgtataggatggattcttctgggatgacagggattgtcccgtttttatatcaaagggacccactccgtgaaaataggatggattcttttccgccggacggtatcccttaccctttttcgtcatcacatggaccagaactgcgtgatccagcttctgggcctccctcagcaccttgcagagggcctggatattatggccgtccaccgggcccagataggtaatgcccatattttcaaacagcataccgggtataaacagctgttttatgctgttcttggtgcgtttgattttatctatcatggcagtgcccaccaccggaatccggtccagggcgtctgccacgctctttttcaggtcgttgtagccgctgcctgtgcgcaggccgtttaagtagcgggacatgccccctacattttctgaaatggacatcttattgtcattcagcacaatgatgaaattcttcttcatcctggcggcattattcagggcttcatacgccatgccgccggtaagggccccgtctccaatgacggataccacacggtagtcctcacctctgatatcgcgccccagggcgattcccagccccgcagatatggaggtggagctgtggcccgtgtcaaaggaatcatagggactctccttgcgcttcgggaatccgctcaggcctccgtactgacgcagctcgtcaaattccgccatgcgcccgctcaatatcttatgggtataggactggtgccccacatcccatataaccttgtcctccggaagatttaaggtcttaaaaagggcgatggtcagttccaccacgcccagattggaggccagatggcctccggtatggctgattttctcaatcaggaaggtccgtatctcctgggccagtatctttaaatcctcgggcggaagggctttcagttcctccggcccattaatttgttccagtatcataataacggtatctccagtcttacttctgacggcccaccaatgcgcggattaactgctccaggaaatcattgttccccggaagcttgttcagctcttcaatggcttctgtagaaatctgttccacatccttctttgccttgtccaggccttccagggttacataggtcgtctttttattcttttcatcgcttcctgaaggtttgccggtcacatcctggcttcccgtcacatccaggatatcgtcctgaatctggaatgccattccgattttggctgcaagggattccacaatcttgcagtcctcctcagcagcgccgcccaggacagcgcctatcagcatggaagcctcaatcagcgctcccgtcttcagacggtagataaattccagcttgtctcccggtatcgggcctccggccagctccacatccacggtctggcctcctatcatgccgtacacgccggtcttacgggcaagaatccccatagcccgcccaatcctggataattcgtccggatcaatgcttgtttcaaaggcattggcagctgtctcaaaggcatacatcataagggcgtccccggtaagcacaccgatgtcctcgccgtactcagcccatgtgctggccttgcccctgcgcatcatatcatcatccatacagggaagatcatcatgcaccagagaggaggtgtgtatcatctccacagccgccataaagggaatcacagcttccagaagggtgcctgtaaaaagccggcacatctcctgcatgagcatggggcgaaggcgctttcctccagccttcatgctgtaattcattgcctcgaagatagtcttctgatggcctgtttcctccggaagataagttccaattaactgttcaatctctgctgtacgcgcatcaagttcctgtttaaatgtttccttatcactcattttcatcaccctcactcaatatctgaatctgtttttctacattgtctatctgaccgctcaggtacttcaccagcttcatccccgcttcatagcaggtgaatgattcctccagcgtactgtccccggcttccagtttttttatgatttcctccagctgggcaaaattttcctcaatgctggctttattctcttccttttcctgtgtgtccgtcttcttacgcggcatcctctatccctcacttcccggcagtttcatggattccgtctccacgacccgggcgtccacacgcccgtccttaacgctgacgcgtattatgtctccaggctctgcctgtgtaatggaggtgaacgccctgcctctggcgtctgtcacaaatccgaatccgccgcccagcttcttaaggggcgacaatccgtccagtctccctgacaacagggccagcctgtgctttccctctgtaagtcctaaggccatacgcgcctcaaggcgccgtctcctgtcctccagcttacgccgggacaatcccagattttcttccatcatccgttccaggcggctctccatgtctgccaggcgctgcctcctgtcgttgagctgcttttccgggcttagaagctttaagcgcataccgcactggtccagccggaaatgcagcttttccagcctgcgctccatggagcgctccagcacctgcctgtacagattcacctgctccacaaactgaccataatcaaacacagccagttccgctgccgctgacggagtgggcgcccttaaatccgccacataatccgctatggtcacatccgtctcatgccccacggctgagataaccggggtggtgcagttaaagatggccctggccaccatttcctcgttaaaagcccagaggtcttcgatggaacctccgcctcttcccacaatcaggacatctaaccccatacggtccagagtctctatgccctttgcgatgctgtactttgcctgctctccctggaccagggccgggtataatatgagctggacatagggattccttctggcggatatattcatgatgtcacggatagccgctcctgtgccggccgtgacgattcccaccttcctggcatatttgggtatgggctgcttgtaacagctgtcaaacattcccatttcctccagctcattccgcagcttttcaaactggcggaacaggtctccctttccttccctggtaatctcctttgcatagagctggtatcttccgtccctctcgtacacatccacggtgcctgacaccgtaacctcctggccttccctgagctcaaaatccagccctttcctctgtcctgcaaacatgacagcagcgatctgcgcgccgccgtccttcaatgtaaaatagatatggcctgatgtgtggtacttacagttgctcacttccccccgaatggaaatccggttcagggcaaagtcctgtgtaaacatgttcctgatatatgcagttacctgagatacggtgtaaacacttgccatacgtcctgcctacgcttcgctttccttattctccggaatttcctgcggttcctggggaactggagtttcctggggctcctgagaagcccgaatctcctgggaagcctgaatctcctgggaagcctgcgtttcccggtgttcctgagtctccccgcaaaccttgttttcttccggcgctttggcctctgcggcagccctggctcccttgactacaaacttggccagtattccgtttacaaaggacggagaatcatttccgccgaactttttcgccagctccactgcctcattgatggataccttttcaggaatggcgtcgtcgtggagcatctcatacagggccaggcgcaggatggtcagctccacctttcccatgcgcttggtcttccacccggcggctgcctggttcagcttctcatctatctcaggaatcttctccattatgtttgctgttcttgcctgaagatattcactgtctgcctcttttaattctactttatgcaatacctgaagaatacccgactcatctacatcgtcttcttccggggactggaaatactggcccagctgggctatggcctcttcctgcgtcgggtagaagtcagccgagaacagcatcttaaagcaatgctcccgcaattctcttctggtcattttctctgcttgtactaaaaagcggtggctttccgtacattttcctttcttcgtgatgtccgcttcttccctttcctgggcatgtcctaaatagcccggagatgaagccgctttagatattatagcaaacccagtgcataaaaacaataaaaaatgtataaaacactccccaggcaacgctccggggagtgtttacagatattatattaaaccgtggttttatctgccttcatccatattgactccggcaatctttacattcacatccagcaccgtcaggcctgtcatattctcaatggccgtgcttaccttttcctgaacctgctcacttacggacgggatgctgtatccgtagcggatattgagggacaggtctaccgacacatgctcctccgtcacatccaccttgacgcccttgctcagattcttcatgcccagcttgcctaccagttcattggtaatgttgccggccatggaatccactccctccacctctgtggcagccagaccggcaataatagccactacctcatccgcaatctgtacctcgcctattttctctttctcgtataatttatgggtactgcgattttcctcagacatcacaacttacctcctgtcaagacttaattattagtattataacaaatccgcaaggatatgtataggattaatttgtgcgccctctcctgtcctttctccggccctttctcccgtcattcttcccctctttttctcagccgcagcctttcagacagcgcatttccccgtaaaaaggcggtcaggaagcatttgatgaccgcgacagttccttctgaaacgcgttcaggtcctgtcctttcagggcccgctccagaagctccggcattttttggggattacaggcaaaacagggcacatccatggacgcaatcctgcccgctatctgctcgtcataatagggctttccgctgtccgcaatggccaggaggcagaccactgtcacaccggattccttcatctcccggatgcgccttagaagtcccgcccggttgccgccttccatcaggtcgcttacgagaaagaacagggtttttcccggattctccataaactgctggcagtaggccacggatttctcaatgtccgtaccgccgcccagctggaatccaaacagcagatccacggggtcttcgcattgttcggtcaggtccgtgatctttgtgtcaaaggccacgattctggttttaaccgacgcaatgctggccagaatacagctgataaccgaggaatagatgaccgattcccccatggaaccgctctgatccacgtccaggataaccgtatatttattggcggcgttggacgtggtcctgtcataaaaataaaaatgctccggcaccagcctctttaagtcagggttgtaattcttaagattcctgcgtatggtgtccttataatccagggccgccgctgacggaatgggggaatgtctccttctgtccacggcagcggtcactgcccggcggatatcatcggccagcagcctgttaatttcctccacaattctggatataaacgcccgcacctggtccttggaccgccccggtatctggtcctttaaggccagtatcatggaagccaggttcatatccggctccaggttctccaaaagctccggctcaaacaacagctgtttcaggccgcagcgctccattgcatcggactggatgatagtcaccagctccttgtcaaacagggttctgacatcccccagccatttggaaaggacaggggcagaagggccgtttcctgcgcctctgcctcccggtacctttttgccggctccgtctccgaatccgccggagtccgtctgattatagatggacgccagggcctggtccattaaaagctgttcatctgtcagctccacaccgcccatttttccaaactggggactgctttcctccccaagtatcaggcgccatcgtttcattctggtttcaagctccatatattccacccatcctatatatcgtcaaagtcaaaaccgtccaggctgtcaagcagctccatttcctctccctttaacagcccgttcagtatctctcctgcctgggccgtattcacctgccatatttcgcccagattctcagccacatccagcttttccctggaactgaaatcagcaaacgccctgcgtaagaataccagggcccgcttaaattcctgatcatccagagtatccatataggcgctcagctcccgccataaatccagcctggcaataagcgcataccggttcttcttagacaatcctgcaaaccatcctgcccccagttccgccggaatccccctggaaagacggcggcggacctgacggcttaattcctcttcctccatccggccccgctccagcaggatggcggcagcgaaaccggatatgcccgtgttcaggtcatccctggaagctgtctccgcaagcaggcggataaaacgctcctcatccagaaagtcatggtggagacacaggctgttgagctgatccatggcctccataacgcccttttccgcctgactgccacaggtacaggaattaagaaacaccagacaggccctaagaaacatctgattcagtacaggcagcaggggtgtgctgtccagatgacgtatgttgccgaaccgcaccacagcggaaatgctctgcgctgtaccggccagctccatgaagcctgccgcctccaccgagagcccctgcagaatatccgttgcgtaagcaaccatctccggtataccgcagcagcatgcggcctcaatgatatccgctgcctccccaatctgctccgccttcacggcctgctccttcatggcaaaggatgccgcgccggccacagtatctcccttcagggcagactccaccaattcaatttccacttccggggtccaccggatatcccagctctccgcccaggtggcagcttcctgctgctcctttctcagaactgcgaaatgtactcccagcacacgcaggcggtgcaggaaaaatgactggcgcagctcccggtaagcggctgcctccgatttcacattcagtttttcccgcaggtccaggttcagggtaaaggcagtctctgtcttatacttttccagtttcagttcccttagctgcctgtaaaaatcgtcctgcaggcaggtacggctgactccctggggaagctcccccacagccattcctatctccgtgtccgctatggctaatgccagttccggcagactgccgtgccccatggccgtcactgcggcgtccctcaaatcgcgcagggagggcacgctgtatcccttaaggcaggccagggacctggccagttccactgcctcaatgaccccggcagaggataccggaaaaccatgctgcctctgatagccggatatggctgtaaggtagcggtaggttcccatgtccctgtcgccctccagcagtgcctgccacagcatcccgtagtaggcaggcgcctgattgcccgccccatagccggagcgtgtggacaaacggtaataggaataaggcatcagcgtcacattgcagggcacagaaggcagcaatcccatctgcgcatctgtcatggcaggctcctctccggccagtcccgccacatgataagcacctgtcactgccacgattcgttctgcctggaatccctccttcagtgcgtcctccagctttcttctcatatatgcttcccgcacaagtatctccggccagtcgctgtcaccgcctgctgtcagctcccgcagctgccgcccaaaggcgtccgcgccgtcccggtacgcctcatgattttctgagtgctccatgacacgttcccagaaggtctcatggccgtcctccccgttaaaccggtccaaaagcctgtacacatgctcagacgcagagccggacgtatgttccggggacgcctgaccctccccggcccgccggattcccaaaaacacatccgagggcaggtccataaaccggcactgcgccccatgttctttggcccagacaatggcctggtattccggagagtactctgcaaaggggtacaaaaccgtgcgtatcggagagtccttagtaaacgccatgactgcaaacggcggcttggtctcctccctcaccatgtcatccatcagcccgttaaaatcagaggggccttccaccagaatcagatccggctgtttttcatccagaaagcttctcagatgataggcgccggccggcgacagatgacggataccaaaacaattcggatgtcccatctattggttcaactccttacactctttataaagtccaagccaccggctgccgcgtttcttcataacattttccaggtattccttccacgccagtccgtccttatcctcatccttgactacagcgccctgaagggcggacgccaggtcataatctgttatttccccatttccgaagctgcctgccagagccatgctgcccgctaaaagcgaaatggcctcggcagtggacaacacgcctgaggacggctttaccttctgcctgccgtccagggtcatgcctccccgcagttccctgaaaatggtgcataccttttccaccacctcatcatggggaatcccggccctgagctccaggctacctgccagctgctccacccttgacttcacaatctccatctccgtggacatgtcggacggcggcgggaggataacgatgttaaatctccgcttcagggctgcggacatctcgttgactcccttgtcccttgtgttggctgtggcaatgacggaaaatcctttctgggcaggcagttccagcgccagctccggtatggagatgcgcttttccgacaaaatggaaatcaatgcgtcctgtacctcactggcgcacctggatatctcctcaaaacgggcaatgctgcctgtctccatggcgcggtatacagggctttttatcatggcctccctggacggcccctgggctatgagcatggcgtaattccatgaataacgtatgtgctcctccgtggtgcctgcggttccctgtatcaccttggtggaatccccgttgatggctgcggtcaggtgctcggacagccaggactttgcggttcccggctccccgatcaggagcagggccctgtccgttaccagggtggcaatggcgatttccaccagcctgcggtttccgatgtatttgggtgtgatttcctttccgccaacagttcctcccgtgatataggtgaggacggaacgtggactcattctccagcccgtgggaaccgggtcctgttccgctgcaatcagtgcgtcaatttcctcctggtagagctgttccgcaggcagtcgctgcacgctctcttcttttcctgctatttttcccatgatatcctccaagtctcactttattttcccgcagatatggtccgtcagccctgtcccggcagaccggcagcctcgttgatggcctttctgcaataatcattggcatcccagcttcttctctcggagcttcctttcgggaagccgcacaagatacggtcgatctcccgaagctccgtctgacgctcctcttctgtcatgggaagctgattcatctgatgctgtacggaccacagtgatatgccggcattgggattctttttcacatatgtgcttataagtcccttgaaatccttccagccgctctgtgccagaatgccgtacagctcccggttatccgtcacggtcagagccctcttataaaaataggatcccttctcagcccttttcgctgccggcagcatggagaacaggattttgtcccggtcagtttcccgttgtctgcctgctgcgtccagtcccgcggctgtgtcatttccaaatatcctggcatccatcagcatatccatccatcgggaatccggcttctcataaagcctgcgcccgatgcggtgggctgtcccggacttttcgtccacacggcagaggatttcacactccccgtcttcccggatacagtgaatccggcccagcacagccagcacggccgttctggtcttgcgtttatcttcttttcccagcagggaatccctgggaatctttctgcaataggattcatagacaaaggcagcgggttttgtcagaaaatcagctgccagggctggtcccagccagctcctctcctgctcaccggccagctcccctgccagggaaatcagccgttcatcctggctgtaaataatggaatctaccagcatggcgggaaatttcagccagaactccgggcccgccgggttcatacgggctgccctgcggtatacttcctgcatggccccggagcctttgcccggaagagccgtaagcagctggctcataagtccgtcaaactcttttttgctcatggtttccttttggttcagggtttcttctattatcccggccagccggtctgaaaccaggtcggatttggaaaaacggagataacccacgatctcccgccccttctttttaaactgctcctcccagtatgcatctgtctcttcctgctccatcatgcccagcacctgctctgtcatctccaggcatagtcccttttctgtccgtgccaaatctaacagcacgcctgtgttttccgtattaaaccggagggcatggatagcctctgccctcagttccttcttcgcccgtttaagaaggcccagataaaattcattttcctccccgccgcatatggactctatgaccctgagcctgtgtatccgcccgttatccgtggtctcccagaatccccgcttcacaagcggaacaatctgtccatccttcccagacagaaacttctctgccgcatctgctatctccgcataccggtccgaaagagccgttatgacagccgcctgcagacggtaatcctcaaaaacaaggggatgctcctccatggcctcggtgatgggcaccagccgtcctcctccggactccgtcagcgcctgctccaggggatgaacctggctgtagggcaggcacggcgcataactgcgtgatatcagctccagcggccggggccctgcctcagcccccgcctctggttcaggccgggtcagtgcatccccgctgtcctgtcctatatgataaccggtctcatatccggcctgggtacacaaaagggcctctgacagggccagggcatctaacagacagcccggacggtcctcacagtccggtgccataacgttctctgccattgtatacaatttttttatcaccggcacggcctgggccaggggccggatctgctccactgccctcctgagccggaaatcatctccaatcaggttcaccccggccactgccgctgctccaaggcgctcatggagttcatataatccctgcaattccatggtaattcctccctttcctggttctgtccgtcaatagagcaggcggaccacttcttttgccgtgatgattgaataggggtgcagacatatcctatgtctgctcctgtcataccagagaactccgaacatcacctgatttcctgccatctgcctgtcaggcaggatgtccaggcggcagacagacggcctgtcccccggcctgtccttcagttctatggtgctgttgccgcagtacattatgtattcccgctgttcccccttgacgccttctgtgccgactgtccccagcccgtcataggataccagacagccgaaccgcccgtccgacaatgtgtttttaagctcattctttgccgcctttaccagttcgggaagggatgaagaggccttatcacgggcttctgccagcagttctccggtcaccggcaggaattcctgtccctcccagcgtatcctccgtccgttctctcccggataatacaccagcatgggcaccctgagcgcttccgtcacggaatcctcttccttcacatacttgagggccttcacagggcggtaattataggtaatatcaatctcaccgctgtccaaatccagccaccagcccttgtccaccagttcccttctggccccgtcatagctgacatgaaaggacagctggagcaggcgtacgttttcctttttaagccccagctctatcagcctatccaggttccagattccgcccagctcctcatacaggacgcttgcgtcatcctccacctggccctgctccagcttttccgtcagataagcccttgacttttttatcagggcccggagaaataccaggattcttacggcctctttgtaatccccttttccatcctccttaagccgcgaaacctccagcacaagggactgcaccagtctttggggacccggaaggtagtaatcccccagctgctttgccaggtcctggtataccttcaccgatgttccgttcagggttcccagtcctgcctccaccagctccctcaccaccttctccgccaggtccagtccctccagctgtttcttaagcttctttgtcctggctgcctggttcgtctttttaggggccctgggcctgtcaccctgactctccttttttcctgccctgacatccttcttcgcccttttatccaatatatcctggggaatgtcacagatatcccaatggcggccctgtgacagctccatcatgagagccagaccatgtttgcacggaaactgcctgctggggcagctgcagcggcacactggggcatcattgtccgcaaaatccagggtcaccctgtaggccgaactgccgcttcccttgcaggagcccatgtaaaaggtgtcgtcctctgaccgggcatgttctgtgaaacctccgcttttgacaatttttcttgcattattgaccgcattggcattgggagccatggcggcaatctgctgttccgggatttccctcataatatcctccatcctgtacacgaactgcggtacaactatgtgattggttatttattccattatacggaaatttggagggggttgcaatggaaagtggggcaaagcgtaaaaaggctgccgcctttccggtctttcaaccgttaaagcggcagcccggccttctgtgttccttctgcctattctgccatattgagcagtgtaatgataatctggtctgctcccacctctgccttgcgtttcacaatgtcctcaatctgggcccgctggggatccgttatggaaggagcgttgatgaccacatccaccttatccttggtgatgctgacaaccggatctgagaagccttttgccatcaggagggtttctgcggcattttccttctcggaaacctcggtcaggtcaatcatgtcctggatggcctgctgtttggctgcttcgtcaatgctgtcactgttaatcaggctcatcagtgtctctttgttcttggcgcgcacctgctccctgctgagctgcacgtttgctatgtaatcagccacgttcatgccgctggtcagtacggcttccccgggattctccaggccggcctgggcggagctgtccgtatcagccgctgccatctgccccggatcagctgcctgggtagcctcctcaactcctgtgccgtctccggcctgggccagctgtccctggtcagccccggtatcggctgccgcctgggcgccgtctgcgtcgcttaccgcatccaggtcagaagggtcctggtccaggctgggaatctcctgtagtccggcctggccgtttaaggaggctgcctggttctccgccaggatatcttcatccgaaatgtccatggcgcctgcctcatacacccggttgccgcttgccaaatccttcttccccgcgtagttcagatatccggctgccgcaatcatgacagccagtgtcgtgatgatgatttggttcctgcggaagagacgtttcatgttcatgtccttcatgtgctcttttacctgtttcatattcttgattttcatatcctgcactcctttatttattccaccctctttaatacttttattttatgtgccggcaggccaaataatgcttccatagcctcagaaatttcagcttttacagttgggctgcctccgccctctgcgctgatgatgattcccgatatctccggactcagttctttttcaacaatgggcgcgtttgtactactgccggaaccgcttcctgccagtatggtattctcctgtatctggttgtttgtcacatccctggtgcctccccctgaatccttttcctgggtggtactggtattcgtggagcgatccacccgcagcaccttttcgctggaggatttaagcaccaccatgacatccaccttccccacgccgtccacggactttaatatattcctgattctgttttccatctgtgcttcataggatccgtcctcggatgtacgggccgccgccgggtaggaatcttcccggccgtctgatgcgcctgccccatttccgtccggcccctgggccatcccgttttgggaggagccctggccaaagccgctgtcctctccgctgccgtttgtattgtcctttgtccacagcggaaccgcccctgcgccctctgtgccggcccccgcgatctgcccgccggcattcttatccttcttgcttcctccgggcaggggaaaggagagaatcatgagaagaactcctataagaagcaataacagccacttttccttagtcatttttccattgaatctggatatccgattcttccagcccatagtactgcgccacctttcctgttaaatggtttatttttttgtccgccgccatgcctcctgcctccccctccccctgttccggtgtgtccccgttattctccacgcctccggtctccggcagctctcccagctccacatcctcaaccttcacactgtcaatcctccccgcgtccacattcacaggcctgctccccatataatcccagctgccctgctctgtatccgcctttttcccgctgatgaccagaccgattccttcaatctgcccataacggctgctgtttctgtcaccgtcaatctgtacgctggctccggtgcattccagtccctccgccctggccatggcctccacatccgctgccactgcctgctcatattcacggatgacctggtccagacgccgttcttccatcccccaaagatcctgcttcaaatcatccgtatcattctgaaaagaaatggatttaaacatggacgatatctgctcatccaggtgcagccctcctgtaaatgggctcactaccagaagaatcaggaccatgcccgaaaaaaagcggatatatttgccgtatttggaatccgccagaagattatttaccacagaaagaaaaatcatgtagtatatgatgttcttcacccatccatagacagcttccataggcatctccttttatttaacacaataggttccgggatttttcagtctgctttgctaggaggcaaaataattcacattggtggtggcgcatgtaatggctatggctaccataaacagaaacatggagtaaagcacaatctgcagcagcagcttatgtcctttggacacgcccgacacacaggacaccacccgtttgtcacacacaggctgcatcacggcagccacgcactggtacatgatcatgaggactgtcagcttcatcaccggaacaacggatatgacagccaataccaccacggccgcggctcccattgtattcttaatcagcacccctgagcccagaaccatctgggccatggccccggccccctggcccagccccggaatcatttccataagccgtttcattcctgcctggcctgccgcgtcagcatagggaagtatcatggcctgtatgagatgaaatcccaccaccagcccggtcagggtccgcaggctccacaccacggcctgctccagcagttcagtcagctttgataaaagcgcctcctttgccacatggcttcccaataccatgagcacataaatcctgaccatggatatgaggactgtgctgcacagccattgtaccccggtcactgcgcccagcatacactcatacagcgccagggcgctcatgctgcccccggaaaacgccaccgccatatagtaggccggcatgagcagcttcatgaattccagtatctgttccatcacctgggccgccacctgcagactggcggaaaagctggctgccagacatgtaaacagcaggagatatgtaacgaaaaaacctgtgtcggaaatctggcctcccttaaatacggaagaaacattggtaaatacagctccaatcagaccaatggcagccacctgaaacagcatctggctccccctgtccacctgcgagaacagagcgttcttaagccccattccggtctggcccaggatgccctttaagtttcctttcatcagctccttcatcagcccccagaaggaaagtccttccattcccccgtcctgctgtcccatgacatcatccagaaactgctgaagcccctccatttcatcctgaagtcccatgtcctgcaaagcctggtccgcccctgtctctgccccctgcgccccgcttgcgtcccatccccggcctgggtcctgttccccgccaatgcctgtcccctgtccccccaccgaagcgccgtaaacaggtccgcctgcccatcccaggactccggcaaacagcactgccaggccccacagggccgcgctcctgactccccatttcttccatctcttcatcccaaaaatgtctccaatgtcccaaaaagcgccagcagaatgggcatactgatacccagaatggacagcttcccgaatatttcaatctggtttcccagggaaccgtaccctgcgtccttgcagattccggatgcaaattcggccacataggtaatgcccaccattttaagcagggtcaccagatacacgctgtttaccttgatatagccctgaatccgttccagggcctccagtatatccttcagctttccggtaccgtaaaagaagataaaggcgcctgccgccatgaccatatatgctgcgtattctccctttaatccctttaactgcaccgccagcaggaccgtggcaatccccgcagccgcaatggtaataattgtcatatggtttcctccctgaaaaggcgcgttttacagcgcaaacagattcttcattgtctcaaacaggtcgtatatgtaaggtatcatccagaataaaaccagcaccagcccagccagactcgtaagaaaagcctgttcatcccggccgctgtgctttaatacctggcagatgacagataccaggattcctactgccgctatgcgaaatatcagatttacacccattgccgtctcctcaatcttcttaaaatatatttataaatgtgtcctgtgccccacagtcacatcaccatcgtgaagcatatgtccctgacttgtcttaaaacattacaatcacaagaaacatcccgcccatgattcccaggcttgtgtacagcctgcatttctccctctggttctgcctcagataatcaatcgtcaaatccagctgttccagatacagcttcagggtccgttcctgcatgtccacatccagataccccagatgctcccccagatgggccagctgttccaaatcctcctgttccaggggaatggggcccgaatccgtattcaggttcatcacctggcgtttccatatctcctgaagggattctccctcctgcatataaattccctctgccgcggcctcaaacaggccccccagaggtcccggctcccgtttccccacccgctccagggcttccgccagcggcgcccggctgtatgtaatctcgccttttaagaaatatatcatctgcctcagggtttccagcatcctcagccgccctttccactgcatggcagaccagattcccagtccgccagcggaaaacagcaccagaactgcccctgtccatttaaatgccgccaccttccgactcctttccgcttccatctgcatacaggacatttcccctgccgtcccatatagacgccacatggcctgccgttccccggcagtccagaagaatcatccgctcaaaggcgccctgttgtatcagctctcccacagccggcttctgcatgatatcctccagcgaactgccgtggatggtggctgccagagaacagccgcagtttctcacatattcaatggcctgcacgtcctccctgctcccaatctcatccaccgctatgacctggggcgccatggacctcaccaacatcatcatgccctggcttttgggacagcagtccagcacatcggttctcatgcccagatcattctggggcaccccctggtagcaggctcctaactcagaccgctcatccaccactcccacggacacccccggtatccttctgccggatcgctgggtcctgggtccgtccgagacctgacggatcatgtcccgcagcagggtggtcttgccgcacctgggcggcgatatcaccaatgtattcaggaaacggccatcgtctgaatacagataatccatcacctggttggcgcagccctgaatctgatgggctacccgtatattgatgaaggagatggatttcataagccgtatatcctgtccaaaagccatggtcctgccagccacaccaatccggtgcccgccctgtatggtgatgaatccctggcgcagctcttcttccgctgcatagacggaaaagctgcacatatattccacggtctccttcatctgagcctggctgaccgttacgattccggccctggcccagtaccgctcctgctcctggcagcggccgcttccccggatatcccttaccggcggatcgggaacccccaccgccaggcttccatctgttttaaccgcatattcccggccgccgcagataagcagcagcggcttctgggtcctcatccgtatctcctgtaccctgtcgaaatccacagtaacctgtccaagtactgcacgcagatcccttgggaatatttttaggacttcttccctgccagccataatcttcaccccttttacctcaatatatgaaacgtgtccaaaaatatgactggagccgaaaaaaaggcagcaccggcccggcgggggctgtgctgccaattctgattcatctgtgtctgttttatctgtcttatctgtttccttctatctatcttcttctctttaccttcttaacaatctggcccgtaggcctcctgtcaatcttgtatacaatctgcataaaccgggccacctcgtcccaggcttcccggctctcaggaaccaggtccatgctcatctggaacacatgaaacatcccctcatacacggacacccggcgctttactccggccctccgggcattctgggccacctccagcgtatcgcttaaaagcatctcatggccgccagcctgaagaagcatgggcggcaggcccctgaaatccccgaatacaggcgacatataaggatccctgggatcagcgccgctgatgtatgaggaattgtaaagcatactctcccgtgaattgccaaagagaggatcattttcaaaattaaattcataactgtcaccgctgcatgtcaaatcggcccagggggacatgagcaccagcccggcgggctgaggcatcccatggtccctgaggtaaagacacagggccagggccaggccgcctcctgcggaatcaccggcaaccaccacctggcccggcctgtagtgtttttccttaaccagccactggtaggcgtgaataacatcctccagggccgccggatacgggtgttccggcgccaccctgtaatccacggtcagcacatccccgccgtagctgagacggctgtagcgcacggaaaacttacggtaaatattcttcatggggcctatatatccgcctccgtggagctgaagcaccaccctgccggtgaccactccctccggcttaagatattccattttaaagggttccctgtcaataatttcatactcgtagccagatgggcatacccaggccggttccacgggatttttcctgaattcccctgtctggatgggttttcccagggacgtttccatgatgtcgtgaatcatatcccgcaccagcgccccccgtatactcacatttttattacgcatgcttatctgtatcctctctgtaaatgcagggtccctccgttatcacagatgaaaccgtctgatgagttcgttcttaaaccttctgtcccccaggaatatggtcaaagccaggattcccacggtcagtattactgttataattgccatggcagggtgggtgaccagccctgcggcccacaaaatcagcgggataaagctgaaaaccgtaatggcgatctggtacatgaaatagctctgccagttcaaacggttcacaacaatgaggaacaccacggccgcgtccgcaaacagtatggttcccggcacagcatagttgacggaccagccttcaaatcccaggacccggtctatcatcacaagcagaatctgcatgccaatggtttctatcagcagtgattttcccagattggcatggcgcaggatggaataccggagggtcaggcccacataggcgatacccggtatggcaatgccggaccaccagagcccgtcataggtaacaatattcaccaggcccagaaacagtgccaccacagccaatacaccgtagcatacaagcaccagttttttccatatgctctcgtcatgctgaatcaccggataattccccttatccgcctccggcatgataacgccgttgctctccagctccaccggaatgccgtccgccctcaggcggccgaaaaaacattcctccagcctggaatcctggaataccttggtgaaggtgatgacggtcctgtggccgaaggaacacacgccgcatttggccggctggcgctttgacaccccaatcagcatgcggaacccttcaatgtcatcctgatactcccggtccatggagataagaccgatattggataaggtaatggtatgggccctgtcattgcgccggaagatgaagcccagagccagccacttgacaaacagcggaaggatgcggacataccatttcttctcatttgagacattgtaggaaatggtctcctccagtttttccttcactatcttctcgtccatctgcctgcataccgatgcgagaatttcctcaaattcatccctgccctgtcccggttcatggtcaatggctgtcaccgcgaaaaagttggaggctgtgtcggatccgaaaaaggccctcaggttaatgggaaggttcacaccgatatggcgtcccttccggccttcctcctcatatactctggaaatggaccagatcaggcaggcggtcaggtactttgtgatactgacccccattttacggcttaccgccttaagctcccctgtgtccgcgtacccgtggaccacactctcccctccaaagggaatatatctcccagtaaggcgcagcgccggccgggagctgtagcgtctggtctgcattttccggtaattcttaaggtagctgtcctctgtctgggtggacacgccttctcccggccccgcgccggtcctgcgccctccccgctttaattccaggtatcctgcggtcagttccttcaggaaattcacggcccccatgccgtccgtcaccgcatgaaatacctccagattgattctggttccataatagcttacccggaacaggtagagctggttgctcttggggtcgatatagcggcagggccagcttccctcctgctccacaaagggctggcgtttgttctcctcgaagtaataccagaaaaaacctctcttaagcttcaccttgaacccggcaaaccagggcagtacctcttccagcgcctgtcccagcagtccggggtctatctcttctttcaatgttacggaaatacggaatacattgctcaggttttcattggctatcatgggaaatatcttacctgtgttatccagcctgtgccaccgttttccctggggattctttttcatagcgcccctttctgccggccgtcccgcagatttcctgccggtccggcgcaaactgtattttctgccattatatctctatcatcctgcattcacaactatattatacttaatttttgtctgccccattgtttttgccgctgttttagccattatttttgccccccatgccttcttttggcgtcttttgtttttactccggatatgatatattggacccatacgcccggacaatggcgggctgctttcaaattccgcagaaaatatcatgattcctcctttatttcacctaaaataggggtataacaacaagaggaggtatccctatgaaaaccatacatacacatgccctggagctttcaggaagcagctatgaggccggccgcctgctgggcagccgtctggcatctgttcccagtcttaagaagcgcctctcaggcggtttccccggcttcggcctgacgcagtttaaccaggccagccaatgttttagccgctggtgtcccgggcttaacgaagagctggccggatttgccgatgccctgggctgcgcccctgagcaggttctctattacggcatgacctggcttacaccgcgctgcagccacctggcccttctgccctccatgactgcctccggtcatcccatgactgccaggaattatgagtttaacgatgaggcagaggattttaccatcataaaaacctgcatcaagggaaaatatacgcatataggaaccagtgtgctgggaatcggccgtgacgacggcatcaatgaaatgggcctgaccgttacactgagctccagcggttttcctgttggccccctgcctgagatgcgcaggcccgcggttaccggtctgcagttctgggccgtggtccgtaccctgctggaaaactgccgcgatgtaaaggaggcattgtccatgctgaaagacatgcctgtggcatacaacctgaacctgattgtgttggacagggaaggccgctgcgccctggtggaaaccctggacgggcgtatggcagtgaagaccattgacagtgactccgtggaacaggccctctatgccaccaaccatcctgtgctggaggaactgattccctatgaacccaaagcattcgtccactccatccgccggtatgataacatcaccgccttcctggagcggcacaagaagggcatcactgccgggcagctgaaggatttctttctgactccttatccggagggcctgtcatgcagttactacagccaatttttcggcaccacaaaaaccatggtcctggaccctgtccggggcagtctttccctgtgctggggaggacggcctgaaaacggctggcatgactttaacttctcggatccatttccccaggaaaccgctgccatcgaaatccataaccagacagcggacccatccatctttgcatacaggagcctcgtatgaactacaacaatgccatagaaaaaaccatcctgtttatagaaagccacctgaccgcatccttcaccgtggaggatgcggccagggaggcgggatattcttattaccatttaaaccggcagttctccgccgtcctcggggagagcgtcggcagctatataaaaaaacggcgtctgtcccacgcggccagggagctcatctacacggagagacgcatcatcgacattgcgctggaccatggttttgaatccagcgaagccttcagcagggccttcaaggccgtctaccacacaagtccggccggctaccgcaaaaacaggctggatgtcatcataagccagaaaccaaaagcggaccagcacctgctggcccacctgacacaatccttgacggtccgcccccgtattgtggagattcccgatatcctcaccgccggcctgcgggatcgcaccaccctgcgaaacaaccggattccccagctgtggacccgttttcttgacctcatgccgcagattcccggtcagatcccccacggccgcggctttggcatatgtgaatcctgcggtgagggaaacaccctgtacaccatgaacgatgatttgctgttctccgaggtggtgtccgtggaagtcagctccatgtcggtccttcctcctcccctggtgtataaaaccattcccggcggaaagtatgctgtgttcactcatacaggctccctaaaaagcctgccactgacctatcagtatatctggggcacctggtccctgaccgcccaggagaagttggacggcagggaggattttgagctgtacgatgagcggttcctgggatttaatcatcctgacagccggattgacatttacattccggtccgataacccataccagtccgataacccatacagggaatcatctgtatgggcactcttacttttcttcccccctgatgattcgtttcatacgtgccagatcatccatggtcaaaaggccattgtccatgtattcctcatacaccacctgcgtggcctccacaaaggcctgccgctcctccctggaaagggtgtaaatttctgcgttggcccggatattttccattgcctgcacttcattttcatcaatgagacggttattttccttcatcatctcttccgtacattctgccagaatctcctgatactccgggggcagcgactcgtaccacctggtatttacatagaagggttccgggtggaactggtaattcacttctgtaaaatacttctggacctcataaaaccgcataccggaggaattgacccacggattttcctgaccgtcaatggcgcctgacttcagggccatatacaggtcgttgtagggaacaatcatgacctcggctcccagagcctccaatgttttattgatggtgtccatgccgttggagcgcatcttaagccctttcagatcctccggcctgcggatcatccgcacgctgttggaaaactgccggaatccgcccgcatcgccgattcccaatatggtggctccgcttttcagggaatccatgcttatttccctggcaaattcggagtttaccagccgttctgcctgggttctgtcttcgcagagaaagggaagggaaaacacaagcatcctgggaactatctccagctgtcccccgcgaaatccctgtatggtgccgtcgcagacctgttccagcatggatgcctcgctgcccagctgaccggccgggtagatatccacctggattccgccgtctgttttctcctccagcagcttcttaaacagcaggaaggactggtggcgcgggttgtccacaggctgggaatggccaatctgcatggaatatatcttttcaggttttttttccaaaccatccttcccctggccgccttcttttattactgcatttggcccctggcctgcatccagccccagacgcgcatccgtgccccggcctgcggcggatgccatctcctctccccctctgtcaaaaccgctgcagcctcccagcaccagcaccatcagagccgctgtcagaatccctgccctgtatattgttctcattccccgtcattctcctctctgatgccttccgcctgctcatagcggaactttaacggagacataccttccattttcttaaatgtccatgtgaagtaattcggctccgaatatcccaccataccgcttatctgcttgatgctgtaggtctcgtttctcagcagttcctttgccttcttcatccggatctgaatcaggtaatccaccaccgtggttcccatatactgcttgaaaaggcggtttacatagtatttgctgaacccggcctccgaggcaatggtatccagggtcaggcgtttctggtaatgttcctgtatgaaggaacagatgccctccacctccctgggcatgtccctgtcctgttccgtgccctcctccccgcaccgggtccgggccaccatgtcccccacccgctcccgggctttctcatagctttcctctatctggctgacatccacaaagggggttccgcttcccatcataaaggcaatctgctgctgttttaaaatcgaagccaggaattcttccatcctcctgaaaatccccggaagcacatccggctcacggcagaaaacaacagccgtaaccatgtggtttgtctcgctgaacatgacggtcaggtccagataatcaaattccttcctgacagcctgaaacagcttctgcctggcgcatttatccagggagccctggaggcggatgcagaaacagtttccgctgcactcagttctgatgtttttcaaatccagatagtagagcacctcctccggcatattgcccagaaccatatcatgaaccatcttgctctccatcatatccagggtctttaacagctttgtttcacggtactccttctccgcctccgcgtccagctcgtcaatggcccgcatgattacattgataaacgcctcctttttcacaggctttaccataaaatccactgccccaaggcgcagtgcctccactgcatactcaaaatagtcataagcagtggaaaagacggcccggaacctgtaatcctgactctttattttttccagagcctggaggccgttcaggccgggcatgttgatgtccagcacaatgatatccggcctgtcgagcatcacccgcttgataacctctgttcccgaagcacattctataacctggtctatatccagggaggattcattgataaagaagcgcagtgcctcccgctccagttcctcgtcatctgcaatcaatattttatacatcttcttctcccctgtgcaggtaaatactgacaatggtgcctgcaccttttttgctcatgattttaagactgtcatccctgcctgtatataaggaaagcctctgccatatattccatactccaatccgttccggctgcttctccgaaagacgcctcctgatcctctccaggcgttccttttctatccccattccattgtcgcaaatccgtatccgtatataattccccgtctttctgacatccagaataagggttcccccttcttccttgggctccaggccatggattaccgcattttccacaaggggctgcagggtaaacctgggaagcgtcacagcctgttccagcttcctgtcatgcctgacatccacgttcagcctggatgaaaaacgcatcttctggatcttcaggtattcctctgtaattcccagctcctctcccaaaagggccggcatctgagcgtccgccaggttatagcgcagcagcactgacaatgaatccagcatggtcagcgcctgttcccggcgccccagcatgacggtcctgttgatgctgtttaaggtattaaagagaaaatggggattaatctggctttgcagcgcaaggaaacgggcctggctcagcagcttttcatactcctcatttttgcgctgttccaccagaagctgcttttcgctctctattttttccttcaggctgaaggccatatggttaaatgcccgcgagagcatgctcactgtattttccccggagctctccttaacgtgcgcgtccagatttcccctgcctatctcctccacctgttttttaagctcatttaagggccgcgtcaccctcacgaatatatagctggctgacgccgcaatgaggacacaggcagctgccacggctcccatgttgaatgcggtcatcaccttccgtctgtaggtcagctcccggttgctgtccacactggactccagcgcatactggagcagttcattggtgtatttctccagatatccgccgatggtctggctgtagtaaaaactgtcataatacctgtaatcgctgccgttgtacagaaaggaggcattgcagcattcactgtagtatgactcaaaggactggtcaattccccgcagaagataccaggattcctcattggtgctctctgtatacaggatatctataacagacctggctttttcataggtatcattaaactcagccaaggtggtgcggtttcccgtcttcatgtactcctcaaacaggatgccgctctggagaaaatggtttttcagctccagtatggagtagtactggtcgatttccttttgatatctggcattaaactggttaaacagggagtggttgtaaatggaaaatgagagaaacagtatcagcatcagaagcagcaccgcattgatttgggcgcccactgaaaaacagaactgtttccaccagaatgttagtttcttcatctgaacactccttcgctgaagctgacctccggttcctccgtaagcgtttccacccaaacctgatggaattgctccatgctctgcttctggtattggtacgtgctctgcgcgcacttttccacggcctccctgtcctccttggagagcgaggtcaggttttccgtgttaatgatcatcacatccggaaggcaccacgcatcatttttggtgacaaaatggatatactggtcgtagttattgcatataaattcagaaaatgaggactcagccccgtcgatattgcctgatatcagcgatttatatgtgttggtattgacggagcctgccagctcgattcccatatcccggaaaatctccgccatcagagcggactcgctgctctcaatcttcttgccctccaaatcctttttatccaggaacgttgcgtctgtgccatagaagcaccgaaaatcggggtaataccagaccaggggcgtgatgcggtccatctggcattcgtccctcagggtttcctcattgctgtgtatccactctgtctgtgcgtctccgcctgcaaagttggaagggacaaagtattttcggatagattccacctcctccgacagctccaggacattgacgcgggccatggcgataccgccgaactttacctgttcaatgatttccgtgggggttcccaggcttccgttatagtaaatcttgaccgttaccctgccctgggtttcacggctcaccatttccgcaaaatacgccatggcctgggcggagggatgattctccggcatggtctccgccagcctcaggattacggcctggctccggggaagggacggactctccggtccgccgtcaaaagcgcagccggtaagaaggacggatgccgccataagaaccgctgccagggcctttgtcagggctgctgatgtctgcgcggggatacgtggatgcatattcaaagtcacgtgagaccttcctttcaggaaaataaattttgcggacattgtatcataactccctcctttccacaacaccaaataccctcaaccgaagctgagggatattggatgccatatgattttattttacaagccccagtacattagggatggtcatggaaatggccggtacataggtcaccagtaacagtatggccgctgtcactgcaaaatatggaagaagtgtcttaaatacttcttcaattttcacatttgccaccttgcagcctgtaaacagaataggtcctaccggcggcgtgattgtaccgatgcacaggttgaatacaatcatgattccgaaatggatggggtgcatgccaaagctggtgcaaatcggaaggaagatgggtgtaaatataaggattgccggggtcgggtccatgaaggttcccaccaccagaagcagcaggttcataatcagaagaatggcaatcttgctgttggtaagtcccaaaagtacatccgcaataatggcaggtatattggtaaagctcataatccagctcatgatggacgatacgccaatcatgaatattacaatggcagtcatctttacgctgtctaacagaatctttcttaaatcccttatcttaatgctgcggtagataaagctcagcagcagggaatatacaaccgcgatagcggaaccttccgtggccgtaaaagcccctattaaaataccgccaataacaatcacgatcaaaagcaggctgggtatggccgcccatacggttttcaacacaatggccagggtgatttcatcccggtttctgtatccgcgtttggatgccataatacccgcaatcaccattactccgattccccataaaaggcctggaagatatcccgccataaacagcgcggagattgacacgctgcccgcaaccgtggagtacacaatcagggtattgctgggaggaatcagcattcctgtgggtgcggatgcaatattcacagccgccatataatcctttgaatagccctctttttcctccagcggcccgatggttccgccgatagccgcggctgccgccacgccggaaccgctgatggctccgaacagcatgttggccaccacattggtctctgccagggctcccggcatcctgccgcttaagattttcgcgcagttcaccagccgtatggcgataccgccgttattcatgatattccccgccagtatgaaaaagggtattgccagcagcgagaaggaattgacgcctgtaaataccttctgtgccgctgttcccatggcattctcaaagggaagcacgcacagcatggcgatggtggaggccagaccgatgctgatactgatgggaattcccaaaaccagcatggtcagcacgcagaccagcataaccagtgctacaagtattgcctgatccataattctatctcctttgttcttagatttctctcagtttttttgccagcttcatctcattgtagacaaaatagaagaggatgaaacatgcgcttacaggcactgccgaatagataattcccatgggaatctgaagcgccgcgtccatctgaatcatttggcttgtaacctgcttatagccgccgaatatcatgacgcctgctgcgaataaggcaaccatcagttcacccagcatttcaacaaccactcttgtctttggaggcatatggtcacggacaaagccgatattcatatgctcccgcagcccaaacacataggccgaaccatacataaccatccagacaaacatatacttggaaagtgattccgtatatgcgttgggactgttaaagaagtatctcacaacaacctggaaggttaccaggattgtcatgacagccaatagtaccacacatacccattcgataatcctgtccaggattctctttgctgattccatgagtcatgaccccgctttctgctaatccctgttagttggcaaggctgcgaatttcttcgtataatgcctttgcgccctcgctcttcattgtcacattgtcgataacaggctggcatgcttcctggaacggagcgatatccacatcaataaactgggcgccagcttcctcagctgtcttttttgcaccctcaaggttttcatcccacagctggaattcacgctccgtgtattccttgcagagatcctttaaggtctgctggtcctcttcgctcatcccctttaaggtggctgtattcataaccaggagatccggaatcatcagatgacgtgtgtaggaaaagtaaggagccacttcatagtgttttaaatctgcataggtaatctcattattttcgccgccgttgattacaccctgctgaatcgcggtataaacctctccctgggccataggtgttcccactccgcccattgcatccagcatagcgatacaggtctgggattccataacgcggatcttgtagccctttaaatcagccggggtctgaaccggcttgtctgtatagatgcagcgcgctcctgctgtaaatgccgccataacgctgaaattgttggcttctgtacttgcaaagatatcgtccagggctccgctggtaaatacctttttctgatgctccacgctgtcataggcgtaaggaaggcccaacacggcaaaatcaggatttacattttccacaatggagttggccaccatcgccatctggatggtaccgctctgtaccagctcaaaggcatccttctgtgagcccagaagctcgttggggctgatttcaattctatatgcgccgccggttgcctcatagaaagcatcgctcatctcggacaaagccagatactggggatgcttctccgactggttaaaagccagctttaatgtagttgtctttacgtccttttcaggtgccttggcctcgcctgccttggtctctccgcctgcggccggtgctgctgtggctgcggacgcggacgcgcctcccccgcatgcagtcaatgacaacgcggttaccccggccaataccaatgttaatgcctttttcatcataatctttctcctgttctcccctttgggattcttaacgttttctttacaggaagattataaacttttccgctttaaattgaactacaaaaaatgggccatgtcctataagaaataagacatggccgcaagatattgatagtgtggatgggcaatattttatagttttaaagccaggataaatacagcctgtttctttaaacaaacctacttctcctgttatttatgatacggctcccccgtaataatcctgtaactcctgtaaacctgttccaacagcaccacccgcatcagctgatgcggaaatgtcatcttagaaaagctcagggcaaagtccgcccgcttcataacatccccggacagccccagcgaaccgcctatgacaaacacaatatggcctaccccatccactcccagcctctgaatcctgcctgccagctcctcgctggtcagcatcttcccctcaatggccagggcaatgacgtaagccccatctttaatattagaaaggatgcgctgtccttccttttccttaatctgccgctcaatggcctcgccggccccgtccggcgtcttttcatccgctacctggatgatatccagtttacagtagcggctcaggcgcttggcatactccctgatggcatcctcaaaatatcgttccttaatctttccaaccgttacaagggtaatcttcatctgctaaaactccagtatcatatcgtaccacacagccccgccgtgaacggatttggaaatgcccatattcacatatccaaaggtttcataatacccaatcagccggtctttacaggtaagaataagtcccctgcgcccctggctcctggcccgttcaatcatggccttcatcagacgggaagccaccccacggtgccggtattcctcaatcacatccaggccgaatatactctggtaggcgccctgcggctcatggagtgaagtatcctcaaacatctcgtccccaatggtcctctcatttgtgacagcgccattgataaacccgatgattcggtttccatcctcagccaccaaaaagctctgaggaaatacatccagacgctccttcaaactttttctgtcggctgcctccgctgccggaaagcaggctgcctccacctgcaccactgcgtccaaatcagccggtaccgctgtccttatggtaataccatccatcttctgtcctcttttcgtatcctttgctgttcttaagcctttaccctgaaatagtatcccacgccccacttcgtatgtacataccttgggtcgctgggactgggttcgattttctcgcgcagcctcctcacatggacatccacggtacgcacatccccgctgtccatggccttatttccccatacataggtcagaagcgcttccctgctgtataccttgttgggattgcgcaccagaagctccagaaggtcaaattccttggctgtgagattgatttcccgctcgccgataaataccctgcggctctctgtatccatcttaaggtcccctgcgccaatcacgccggattccgtctcctcccgcttctgacgtttgctcttcccgcttcttcgtatgatggccttgattctggccttgacctccagtatgttgaagggcttgctgatataatcatcggcgccgtactccagccccagaatcttatccatgtcgccgcccttggccgtcagcataatgatgggcatatccgaaaactcacgtatggcctggcacacctcataaccgtcatacttgggcagcatcacatccagaagcacaatatcatattctgtctttttggccagttcaatggcctcctcgccgtcatatgcacagtccacttccatcccgtcctgttccagactgaagcggattccttttacaattaatttctcatcgtcaaccactaatactcttgccatgttccattccccttatctattattaaacggcggcccgataaccaaggccgcctgccgtcatttacactgtaatactgtccttaatcttttcaaacgcagcatccttgataccggatacattcataatatcctcaatggacttaaatccgccaaactcctggcggtaatggataatgtcatctgccctggacgctccgattcccctgagggtcatcagttcctccctggaagccgtgttaagattcaccctggccttagaaccgccttcgccgctccctgtcctgccggacgtctgaacgcctgctgttccgccgcccatggatatacctgactgagtcagcccacgggccttccactcctctgcctgatcacggtccggcacctgtatcttcatgccgtcctctaacacctgggccagattcagataatccggcactgctgcttctgagaatcctcccgccgcctcaatggcctcatatacccggctgcctgcaggaagtccatatacgcccggcgtactcaccaggccgcatacatgaatatataccagaggcatatcttccccggacaatgtatcctcccggggcagcgtatcttccccggaccggctgcctttctggggcagcatgccatcctgtcccggcgtaccttcctgtccccgcatgccatcctgtcccggcacactgtcctgtacacgcagatgctctccatccgcgtccccggacatggccccggccccgccttccggttcgttccggtaccgcgggccttcaatccccccacgttcctcaacagcgaaaccactgtcagactccaatgccataaccatattttccggtctgatatcccggttcttcacactgcagctatagcatatgcctgcagccaacatacatatgacaatcactgccagttttattactttgaaagatgtaagtttcatcttgggcggtatccctccttccagagagcaccgtcccagcctgatactcctattctatcggaaaccccctgcaaatacaagcgttaatttccaaattttatctttcaaaaattacaattccgcctatggcaatgaccgccccgattatcttgttccacgcaaagggggctttctccacgccaaacagcccgaacagctcaatggcataagctatgattatctgagagaccacaatcagaagagccgccttggccggtcccaggcttcccatgctccggataaccgtgtaggtgataagtgctcccatgataccgcccacaagcacatatttgggcgtaacctgcatgaggccggccacaggctccctgcctgtaaacagccatatgaccacgcaggtaataaaggccgtaagctgtacccagcccgcagccacccagacgctggtctgctttgtcacttccgtgttaaatacgccctgtatgctcattaaggcgcctgacagcaatgctatgataaatcccatgtattattttcctgcctttccattcattttaccgttatcttagcattcccacaggtttctattttattctggcattctctctgcatatgatgtataatcgttccgtcaggaggcacagctatgctatcatttataaaaacattattacaggccagcgcatggcccatccaggcacctgagccatactccgcctttcacatcctgctctgcgccgccggcataccgcttgccgtctttctggcccggcgcctggcacgcacaagtactcacccttgcggtgtgctgtttatctgcggcctggttttagctgtcagtgaactgtataaacagggcttcctatattttgtcgcaggccagggccgatacaactggtggtattttcccttccagctgtgcagcgttcccatgtacctgtgtctgatacttccgttattcaagcatacgccccattgccggatggagaaatgcatttgcaccttcatgcaggattttgcacttttgggaggcgtcatggccctggctgaacccagcggcctcatgcacccctatctgcttttgaccctccatgggtttctgtggcatttcatgctcatcttcatcggcctgtactgcgccatgaccggactgggaggcagaaccccaggcgactttgtatccatgctccccctgttttgggcctgcgtatgcatagccacgttcataaatgtggcttcccatccctacggcaatgccgatatgttttatatcagcccctattatccaaacggacagattgttttccaccagattgccctcaccataggtacggccccgggaaacctactgtacctggcagccatggttctgggaggctttatctgccacctgtccctgggccggctgtttccccggtaaccgttctgacggttaccgccgcccgcctccagccatccattcagacattcagattttcagtcatgcagattttcagtcattcaaaaagccgcctttgtccggtatccggccagacccaaggcggcttcttccatgccctctttccttaatacgttccctttttcaaaagtttgcgcagataggcaaaggtggcttcctccccctggtccttcagcatgtggagaagcttctccaaaagcgctctggtcctgggatggatggtgatgtaattctttgtatactcgtaatattctaacggggccgcgctggtgtaggctttgcccttatacacttcgcaggcagctatccggtcgcagaccatctcagccacataccgcagaggcatcttatttcccaccaggccctcctccttatggttggaaatgtcaatccaatactcataatggtgcttgttcctgcccttatggtgaagccaggccctggaataccccacagtctcacgctccgctgcattggggctgcggtttccctgataataccttaccccggtccagaactcctccggactgtacttggagagatcatgggtaagtccctgccagtacaggccaatctgaaaacaatgcttcctgaccaggtttctgtgccttgtaatggtagaaaaatggttccatatattacagattttcattcaaatcccttctttacacattaatacgcatggcgcactgcattgaaatatgctctagtatatcataaatttcgcctttttggctgtatttcttcatattttaacctttgaacaacagaatctgaggtttatataaattgtttatacttaatgcccaaaaacgtttgacacttttcaacatttatgatatccttaggacagttgcgaaatagtttgcaacatatcacatttttttattttttatattttttggaggtatcgtaatgaaaggtacagttaagtggttcaacaaccagaagggttacggatttatttccgacgagcagggaaacgatgtattcgttcactactcaggtctgaacatggatggcttcaagtccttagatgagggcgcagaagttgagttcgatgtagtaaacggagctaagggtcctcaggctacaaacgtaaccaaattataatcaatgaacaacagtgtacctttttcaaacatatatcatcactgatagaggttgaagtaagttatatctgatttcaaatgattacaagtaagagccagtcctgcgactggctcttattgttattttgctttttccagcatatccttcagttcatccacggaaaacgtgtaattcttattgcagaaatggcagttcacctcaatgggcttgccatcctctatcatttcccgtatatcctttctgcccacgctgatcaacgccttctccacccggtcctttgtacagttgcagtaaaatgcagccggaagccttccgccgatttccaggccgaattccccaagtacatactccagtatcatctccggcgtgttgcccacgtccagcagggtggtaatggacgatatttccttcagcttgttctccagtctgccgatgatatcctcggaagcccccggcatcagctgaatgatgaagcccccggactgacgcaccgtgttgtccttattcatcaggacccccagcgccacggaggacggagtctgttcagaggtggcataataatatgtcaggtcctccgcaatctctcctgtcaccaagatggtctgcccaacatacggctccttaagcccgatgtccttgatgacacttaagacgcccacgcccagcgctccgcccacatccagttttcccttttcattaggaggaagcatcaccatgggattgaacgcatatcccttcacatttcctctggaatccgctgtcacggtcaggcctgcgatgggtccgtccccctgtatcttaagggtgagaaggtcattttcccccttcatgtcacagcccatcatcacaccggccgtcagcagcctgcccagggcagccgttgccaccggactggtattatgggatattctggcctgttccaccaggtccctggtggtggcggcaaaagccctgatctgcccctgtgccgcagttgctctgattacataatctgccatatgattcactcctcgtctctcattgtctttccctgttccctcatgattacatagatgcgttcgctgtcttcccgcaccggattgcgggtgcacgcatcgtaagcagccacaaactccataccggcctccaaggctgcccgtttcacctcatccaggctgtaggccttctggaaatgtgtctcctcatacttgcggtacaactggccctcacggataaacagggtaaggtcatattcgtttattcctgaactttcatcatagaaattgtcccagataaagctgctctcctccctggcctccgcaaaggtgttatctgccagcaattcccggtatttatactctgtgttcaggtcaaatataaataccccccttgggtccagataattattaaccagccggaacacctgcaccaaatcccggtactccatcatatagttcatggaatcacatatgctgacaactgcccgcaccgtgccgtaaagctcaaactcccgcatgtcctgcaggagataaagaatgtcctggcccgaggccgcccgtttatccattgccatctgaagcatttccccggaattatcaatcccaatcatatcatacccggcctctgccagaagcccggtaaggcttcccgtgccgcagcccaggtccagtaccaggccacgctccactccctgctcccggagcagtcctgttacataggaacaccactcctcatagggcacattatcctggaaaatatcgtagacctccgcaaaactgctgtaagcttccatgtcctcatccttcccaacggcgccgcgtctcattcccgcagccatcgccaaatcatcaaactacaaaagcgcctgtccggaacagttccgggcaggcgggtaaaatcaggggctttatgcgttctttccgcagcacttcttatatttcttgccgcttccgcatggacagggatcatttgggaaaatcttcttgcccttgcgcacggtaccggacgccttctgggacttatacagttccttgcgcttatccggtgtaagaatctcgtcccactggggaagctcatacagccagttagccttcgcctctaccatattgtagtacagcttctccgggtcaatctcaattttaacctcagtatcctcttccatggtatcaatggggttctcatagcccttcaggctctcattgattccatccaggaaaccggtcatgataaggatttccgtattgtacttctctgccaggtcctttacagtgcccgtgataacctctgttgggttagaaagaatctgctcatagattcccttctcaatctgaaaatatccagcccacaattcttctttctttttatcatccaggccgtcgccgtaagccagatttctccatgtctctaacagtgccatagtaaaaccatcctttttgtattatttatgttccaggggcttcctgtccagggcgccatgcctctttctgtctgccggaccgttctgctgcctgtccatggccgcccataacccttagtatataacaaaacataagatttttcaaacatattttattttatacagctaaatacagccaaataaacctaaaacctgaggcattccccatacatcccaatacgctgtttttgtttcccctgcagatcaagggtattttttctgtttttctgcaaataatatacctgaatccaattcaattcaaaaggaggctttaccatgaaagtaaacggaaaaaatgagagcatcaaatgtaccatcaagaattgtgcttacaatgcacagtccgaggattactgcacccttgaagccatcaaggtcggaactcatgagatgaacccaaccaagaaggaatgtacagattgcgagtcttttgtaaataaggctcagtaattccgttctcagagactgtgtccggacaggatatattgctgtctggcacagtctcttttttcttttatttatcagataataacatgttatccacattcttttccacaacattgtggataactcgacaaattcgttgattcatccgcaagcctgtcgaaaacagtcaaaaagaaaagcacccgcagtgatataatatcatcaatcacagtggatgctttctatgttaacatggttttctctttgtatttggtcccatcccttcccgcctggaattatgggtctggttctggttttccggctttaccttttccgtaatgctgttaaacatttcatttgacttttttctggcctgcttttcttcttcatatctgtccatatccgtctcccatccgccgcctgcatccgcgggtgcacacacggtgcatgcacggctgtgatttctctgacaacagtatgtcccgaaaagaagaaaaatatgtaaaaagttctaaacttaacttgtatttttttccaaccgtgctataatcgaatcaatggggacatagctcagctgggagagcgctgcgttcgcaacgcagagaccgcgggttcgaatcccgttgtctccattttatatggtgtgccaaaaccctttgcacagaaaggattttggcctttttattttatatccccctataattccatatacattccaaagaaaaactgtaacacataaaaatcatccgtaaaatgaatgaaaccaggaggaactacatgatgaatgatgaaatctttatgaaagaagccatacgcctgtcccagctggctgtcagccatggaaacgaaccctttggagcagtgctggtcaaggacggcgaaattatcttcagcaacgagaaccagatttataccggctccgatcccaccttccacgcagaagccggactgctccggcgtttttgcgcagagacgcatatcacggatttacgcgaatatacactctattccagttgtgaaccctgtttcatgtgctgcggcgcaatggtatggaccaaattggggcggctggtctatggcgccagcgatattgatttgtgcagcatacttcatgagaaaggagccgaatgctgcaaaatcgtctttgagcattccccctggaaaccgcaggttacgtccggggtcctgagggacgaaagcctaaagatattgacagcctatttttcaaaaaatacaaaaggctgagacattctctccactgcctgactccggggttcttagattctatggatgaaccggctgattccggaaagaccaatacaacgcccggcgtcttgtgcgaaaatggcagggtgggcataaagccgcctgccaagccgtgcagccttaacccagacagcctctccccgccatcaaaatggaagctgtgccggtgtatactggaccgtaatccatttcagctccgtaaactcgtcaatggaataggaaccgccttctcttcccacaccgctgttcttgactcctccaaaagccacagtggagttatcagaaaccgtcgcgttattgatatgcaccataccggcctccatgtcaagagacagggacatggcctttgacaaatcattggtcagaagtgatgaggaaagtccgtattgattgtcattgcaaaggcggacagcgtcctgcgcatccactgccttaatgatggaagtgaccggcccaaagctttcctcatagaatatcctcatatccggcgttacatccttcagcactgtgggctggtaaaagtttccctcatgggtcccgccggtcatcagcacggcgcctttggatacagcatcctgaatctggctgtcaatgatctggcactgctcctgtttaatgagaggcccgatgatggtatccttctggtgcggatcccctaccttcatggttctggcataggcagcaaacgcttcacagaacgggtcgtataccggctcctccacaatcagcctggatgtacacatgcatatctctccctgatgaaaaaatgctccgaatcccgcaatcctgacagcctgttccacgtcaaaatcctttaaaaggataagaggattcttaccgcccatttccagagaatatttcttaaaaagaacggacgctttagaggcaatccccctgccaacagcagtagatccggtaaatgccaccatacggatgcgttcatcttcaataagcttgtttccaacctcctcaccggaaccaggaaccagattgaacacaccttttggaattcctgccccgtccagggccttggctatcatcacacctgaaacaggcgttgcgctggctggtttgagcacaaaggtattgcctgctgccagggcaaaggccacctttttaagagccaataacaatgggaaattaaagggagcaatccctgcaaccacccccaggggaagccttcggatcatggatatttcccccgcctcctgctgctggacctggccgaatacccgccggcactcaccggctgctgttctgagtatatccactgcaaatccagcttcaaagtacgcctttccaaaggcagaaccgctttcccccatcagcacatccgccacctcatccatgtgctcctgcatccagtcagctgccttcagaagaatctgctccttttgggcggccggtgtgtctgcccacggcctccatgccctttgggcagctgcaatggcctcctccacttctgccccgcctgcaaaatgcaccctggcaaacacagaatcatcagccggattcttatcctcagccacatatcctgtcaccgtgtccttccattccccgtttatgtataattgatattccattctcaatgcctcctatctcatcttcagcagggctttaatggctttcccgctgtgggaagcatcaaacgcctcattaatctcatcaaattcaaacacgcgaatcaatttgtcaaaggggaactttccctgcttgtaatatgaaatcaactgggggataaacagtttgggatttgaatccccttccacaatgcctatgagggactttccctcgcccatcagctcctcctggacctgtatggtcagctctcccgtcacacccaataccacggccgtccccaggaatttcacacaggccagtgccttttttacaaagtcaggtacgccgctggtatcaatagcataatccgctccgccttccgtaattttcttgatttcacttacaatacaatcacattttttccggttgatggtatgggtggctcccagttcttttgccaggacaaggctttcttcatttccgcccactgcaatgatatttttacagggacacagatgggctgccatgatggcactcatgccaactgtaccgcagccaaacaccaccaggcttgagccggccgtgggtttgagccggttcaggacagcgcccgctcctgtctggattccgcatcccaatggtcccaggatatccagttccaaatcctcatccactttaatgatactgttcttatggacaacggaataggttgcaaaggaggattgtccgaaaaaggaagaaatttcctggccattcttggacagacgcttggtgccgtcgctcatgacaccgccaaaattaatggcattaaaattctcgcaggcatagggtctgcccgccagacagctcttacaatgtccgcagtatccgaaggaaaataccacatgatcccccttctgaaactccgtcactccctctcccaccttctcaacaatcccacatccctcatggcccaagacggccgggagtggtaccggaatcatctgatgctgtgccacctcatccgtgtggcatacaccgctggccgctatctttaccatcacctccccttcacggggatcctgcaggtccaattcctcaaactggaagggcttacctttctctctcacaactgctgctgttatcttcatctgttaaacctccctctctcttatttattgtaccatcatatcactaatcgcgataacttagaacaatagtttgtattttaacatatttactaatattttaacgataaatcaaaatattttttacaatttccgacttcattcgactatagtcatacatttatttacattcagggaattcatctgcccggcaggagttcagccgaccagcaggagttcagccccaaaacagcttaatacgaaaatatattttctgaaatgcaaaaaaaccagacgtcacagcctggccattatatctctaaacctggtatattcggatttcctaccatgcttcaggcggatccgttacctggcttttactgtactcgaatattaccttgttaaaatccttcccccggtccagattatatttactgtaatagagccacacagtcagtttatcgggtgttccattcatctcattatgctgggaaacaataccctgaacctcatggtcaatccgccagggtttatatacaatgacatacaggtccgtttctctgacattcaaaccgctatatgagaacaccttatagattctgtaatcaggcagccgaatataacaggccgccaggagcaataccataaacaggcctgcggcggccatatatttccatatttttttcatttctccccctccattactaatagaacggagaagtgtataataattccctttgttcggtcagtatgcttgtattttttgatttatttccgacacttataatatcaggagaactattacgataaaacaatacacaatatgaaataaggcccgaagcagtttacaattttgttcttatactgcggaacttcgtgagaaatgaaagcctcacagtttcttacggttatgggagccctctgttggatgcattatcgtgatgcattatcgtgatgcattatcggggtacattatcggggtacattatgaaaggcgcattataccaaggaccattgtttatggtacattttatcgtttattttttctgtttttactgttcattacaagaattgcttgccatcctccctgcctatatgatataattagtctcgttggagacatagctcagctgggagagcatctgcttgacgtgtagagggtcgcaggttcgagtcctgttgtctccactggatatttgtgccggaacctttgtttttacagggtcttggcacattttttattattctgatgacaattgctcaaaaagggactaaaccgattggcctaatcccttctctgcaagcagtttttcaattactatcattctcttccccgttccagattccgttcttatccacgtaccatccgtcagttcccaggccacacgttcataggtactgccatcatgccgattaaaatatctctctttccatatctgtaatctcagcttccgtactctcttctataaaataccgtatctcctccatcacactgtcggcttgggcgctatgcggtacgatagcagccacgccaatgacaatggtctggtgtatatcctgctctcccacctctgccacagccacgttaaatttgttccgcattttagacagcaggcttttaacaaccatgcgtttttctttcaatgaatgaacccagggcgcatggagcttgatttttaatgataatatcagcatttcgtccacctcgtaatcaaatacactacgttacaatttctcatcttttaattgtgtcacttccatccactttgtcatgggtaattccagaatgaccttaattataaatatccaatcccttcatatttataaataaactcctctctgccacttatccacaaccataataccactatatatagataaacacaatatcaatcctgattatcttgtgtttttagtggataatgtggataagtgtgtggataaccggtggattaaatgtggatgcaaaccgttttctttttataattcctttttatggttcccttttacggttcctccatccatatttcatttcccgccgttttatttaccattttatttgtctccccaaaatattgccccatgatttataatgtagtatgattaggatatattatctagtaaactgacctatcaatcacaccacaggaggtattaaaatgaaattcttcaccaaggcactcatcatcctggcggttattctccttatattggcattgggcgacagcatattcaacggtcttttcagcaatgacggttatcgccccgtaacccagcaaatgaaagagatcatgacaggaaccgattaggttccttttttgataccctgtcgctgatattcacaattttcttacaaatcgttcatattttcgctacaggatgctcataggatgctcatatttagcccatatactatatcttgtaagttgatattgctaatcagactttttttcataatacagccggtaggagaaatcctgaccggctcctcccttttttaaggctttttgacctgtactcttcctcccacaccttgtccacccgcggatgagggctccagattcaaacaatatctgacgcctcccccagtttatatctgacaaaaataaaaatactccacctcattgatgataatactcatattggggttatccagcaaacttcttgtcctgtttataacatttatgagcgacttcttataggttccgctatcagccacctccaccgggttcctgacagcagagacacaatgccctactttccccagttggcagccgcgtatctcaccgcatatcaagctgtgtgttgtcactgtcccggtgacatagactcctgtggagccgtactcctcgtccgcagccatttcccagcatcttcccacaaagtcgtctgtgtaatattttgtatcaatcccaaaaaatgtgataatatactgctctgttgtcatattaatacccgcagccttttacaatatcttattcagacatagcgcattcattgcaggtccacatatcctaaagcagattcagaacagtgatactccatggattcccccttctattcctccctgcctatctgctttatgatttgattgacatacgtgctcagccctgccagcaggattccctgggttatggcggtaaatattgccatgaaaatttcctgcccagaccggcatgtacttgtggcaagcacataaatcccgcatatgacaattcccaggccgccgttgattaaggggatatatctgtccttcaccgcctcactctgcttaatccacatgcccacaaaatacagcacaagagccaccacaattaactcgggctttacataatccgttatctgcatacacactttcctcctgttacttgtcttactatcagtatattaagctgaacaggttttgacagtcccaagcccaaaaaagagaagccctacggctcctcttccattttcccataaacctcagtatctgctttctgtctcagtgtgttaggccccagatactcgccaccgtgccatctgggattgaatgtctctacattctttgcctgctcttccagttcctttgtggatttctgctctccctgtttcattttcatcacctctgggatagtatgtaccatgacagtgggaaacatgtatcagatatacagtatcagaaatctccgccccggcaaagcccctgtgtttaaaaaatcagccccggcacgccactggcgccggagctgatttaaaaaggggaggataagtattaattattttctctttcgtgtatactcctattatggccccatcccaaagaattatacacacccgatacatttttttaaattattttcctttcccctgtttttcccgccattcccgctcccctgccgtctgttttattccgctctgtccctacagtatcatcatcagtgtcccggttatcagcaccgtgctgatgacgacagatatagagttcaccgcgcttgccagtcccacatccgcccccaggtttcctgtaaatgcaggtgcggcagaggacatggggctgagggcaagtatggtcagagcctgactgtattctatcccaacgggcagcaggaaataaaagaccagagccagtacaatggccagtgaataccgggccgcaagtatcttcacgattttacccggctggctgctgtccccgttcagcttaaatcccaccccaatcataagcatggccataaatgcatttgcatttccaatcactccggtaaatgaggtaatgggggccggcagtcccacatggagaagcgacagcacggtcataatcagatatgcgtcaaaaggaatggatttgagcagcgtctttataaccggaaacatgctgaacctggcgttcttctcctttgtcgccaccgccgcgctgtaggccccgcctagacagataaacgcgtttccggtatcaaacaggctggttgccaccacaccaacaggacccaggaagctctgggcaaagggcatggtaaaattacctatattgtatcctggcaaattcagtatattaaatgcccgttcttcccgatcttttccgatactcataaaaaaggccacggcgatatacaaaatgccgcctgcaaagcccagcagtgtcaccaccagcatggacggcttcaggtcgatccctgaaaaattagatataatcgccgcgggaagggttattttaagtacgattttcgataagacataaaaatcttcctccttaaaaaagcctgctcttctcaacagatttcccattattatgacagccacaaaagaaccggctttcatcaacacttctgccattttatcatttctcccatccgttttctcttcccgccccggcttttgatttaaaccttttgatttaaaccttttgattaaaaccttcatttcgcaaatactggttatcgcaagtccttgttataatatcaaaaacaacggcagactgcaataacaaaacaatatgagacagacaaattgaggcagacaaatccccaggaatccccgaacagctccagtacgtctccggtacacccccagtataatccaagtacatctccagtacagtcccagtacagcaggaggacagaaagaaagaccggacgcctaacctggcgccggtctctccaatccctttgcgagacagcacacatgctcacatgtgtcccagtcctctgtctcctttaaagggcagctttatactccggattcccgtaccgcctatacatatcccagcagtcccggcagccacatggacagaatcggaacataggatacaagcagcagtacaacaaatatggccgcaaaatacagcagcaggggtttaattacattttcaatcttggtcttacccacctttacacctacaaacagcgtcgttcctaccggaggcgtgatggttccgatacacaggttgaatatcatcataataccgaaatgtacggtattcatacccagggcctggcagattggcaggaagataggtgtgaagataagacaggccggcgtcatgtccataaatgtaccgataatcagcaggaggatattgatgataaaaagaatcacataccggttgttgctgatacctaacattgcctctgatacggctgtggggattccggtaaaggccataacccagctcataatgctggacacgccaatcaggaaaataatgatgcctgtcatctccgcgctgtccaggaaaatcttaggcagctcagagaactttatggacttatagaagaacagggaaagaatcaggctgtacaccaccgccaccacgcttccctcagttgcggtaaaaataccgctgataataccgccgataacaatgacaatcatcagcagacagggaatggcctggaagaaaacctttaccttttcactgttggaatatttctttgtgctgcggtaccctttcttcttggcaaaatagaagataaccgccatacaggcaaggccccagaggatgcccggaatgtatcccgccatgaacagggctgccaccgaggtgccgccgctgaccagggagtaggtaatcattacattgctgggaggaatcagaaggccggttggcgccgtggcaatattagcagcagcagagaaatccctgtcatagccctcctcttcctcaataggcccgatgatggaacccattgcggaggcagccgcggtaccggaaccggatatggcgccgaacagcatgtttgccactgcgttggtatgggccagggcgccgggaatgcttcctgtaaaaagctttgcaaagttaatgagacggatggcaataccgcccttattcatgatatttcctgccaggatgaaaaacggaatggcaagaaggctgaatacggatatgcctgaaaaaattctctgtgcccctgtaagcacggctgctcccgtattgagtaccggaagaatggcacagatggatgacactgccagggctaccgcaatgggaacccccgccaagagcatcactactaaaagcaccaaaataatcagtccgcagactactgctatattcatactcctgcatcctcctttttgccaaaatccgtgtgcagcatgtctgccgcgttcatcagactgaacatcatgataataatgcctgtcacaggtacaatcacatagatatatcccataggcaccctgagggatgctgtggtctggatcatggtcagctttgtgatggagataccgccgtaaaccatgaccacaccggcaaaggcaaaggtcagcaggtcaatgatgacttccagatatttcttggctgaaccgctaatcttatccgccagaaatcccatcctcatatggtcccttttgccgaacacataggcggaagccagcagggccatccatgtgaagctgtaggttaaaagctcctctgaaacagtactgggcttattgaagaaatagcgggtaacaatctggtaggtcccgattatcgtcatcagcataaacaggcagatgataaaaactcccagaatctgcatgattctggatctcactttatgcattgtctccatcctgctttcctcccttcgctttttcgtttatttcctggatatgattgtacaggtccgcaatcttgggattatcctttaacatggtctcatgaagaggcagcaccttttgtttgaacgcatccacgtccacatctataaattccacgcccattttattctgtgcaatgtccttggcttcctcaatgctcttatcccactcctcaagctccacctctgtggacagtgctgcagcgtccttgaatacctggtattcctcagggctcaaaccgtttaaaaatttcaggttggcaaccagcatatccggcaccatctgatgcttgttataggcataatacttggcaacctcgccgtgcttgttgttggtaagggccagctcgttgttctccgcaccgtcgataacgccctgctggatagccgtatacacctcaccgaatcccatgggggctgccgctgctccgaaggcattgaccatggccacgctggccgggctctgctgaacccttatcttctttccctttaagtcatcaggggtatgaatcggagtcttggcataaaaattcctgacgcctgcattgtaccaggtaaccaccctgaaaccggcttcgtccgtggactcataaaccttttccatgtagtccgtatcctgcattacagatttgtacacatcctctgagtcgaaaagatagggcatactgaatatttcgtatacgcctgcaaacgtctcaagattggcggttccggccacaacaaagtcaatggcccctgtctgggtcagctcaatggccttctgggcagaacccaggatttcattggggaatatctggacctcgtacttgtcccccagccgttcctccacatattccttaaaagctaaaagccctatatgctccggatgcgtctctgactgggcatgggatacacggataatccgttttccggaagtcactgagccacagcctgtaagacctgctgccacagcagctgcaagggcggcagccgccactctctttatgaattttctcacttttttcattcctttccctttatacggcaaattcttttgtttcaatacatcccagaaacctgcgttcctgtttattctggactgaaatactgtttcccataccgcaaaacggcggccttttgctgcccgttgcccagctctttcagagtcccggcccttttctccacaacaaaagccccttggctatcaaccagaaaacgttaagattttttggcgccttcttaacactttcttaattatatagccaggggcttttattttgtaccgtaaaagtttgtcatacaggaagaagattttgtcctcccccatttttttctagttaccttcgcataaatgcacaaaaaccctgttctatttttgtgcagtctcactatccctgtactcggatggtatcattccggtcatgcgcttgaacacttttgcaaaataattggaatcataataccctacctgcatactcacatccttgacacttatgctcctgtccttcagcagttttttggcctcgtttaccctgaaaccggtgaggtaggaggtgaaattctggtcaaagcactgtttgaacagcttgcagaaataggcgtctgaataattcatcatcctggcagcatcctgcatggatatttccttcatataattattccgtatatactcccgaatggtttccgccacctgggccaggcgtccgtccccgtcatccctgggcatggcttctgcatgttcctcccggcggatgtccggagaaggaacacctggagaaggaacgcccggagaaggaacacctggagaaggaacgcccgaaacattcagccgtttatccgtcagccgcatggcctcctccatgacagccaccagctcatcctcctcgcagggcttcagcagataatccagggcccgtatgacaatggccctcttggcataggaaaactcatcataggctgtcaggaaaataataatacagtcctcgtccaggctgcggatgcgttccgccgcctccaccccgttcatctccggcatggatatgtccatgaccacaatctggcttttttcccttttgaatgtctccagggcctccgccccgttcactgcctcgctgatatccaggctgccgcaaaaatgcctcttcagacgcttggccagcgccatacgttcaatctgttcatcatccgccagcaatacacgatacatatacctcatcctttcgtcctgtcatcagggtgtaaaggccatctgcacgaccgttccccgtccctcactgctgtaaatgaaaacctcgccgtcccggtacattccatggaccctgcggtaaatatttcccacacccacgccggtggccttctcctctccccttgccagggcgaggcgtatttcctccagccgttcctgcgccattccccgtcctgtatcagccaccgatatccagagccgccttccctccatccaggaacggacatgtatccttcccccctgtcccttgggagaaatgccgtggataatggcgttttccaccagaggctgcagggcgaaggagggcaccagcacctccatggtatccggcttacagtccgtgtcatagcggattctctgtccgaaccgcatctgctgcaaatacatgtagtcctgcaccaccttaagctcccgctccaggggcatcacggagtccgtggatttcaggttatagcggaacagcctgctcagggcatggatcatcttctctgtggtgtctgcatcctcaatctgggccgtactggcaatcatattcagtgtattgaacagaaagtggggatttatctggtttttcagcatctgcagccgcacctcgtccagctgcttctccatcctgtgcttttccgtcagggcttcaatatatcccctggtactggctttcatagtgcaaaaggccctgaccaggctggcaatctcatcactgccctccgcacaggtgtccgggcccgtaaaatcattttcccctatccgtctggagtcctccgccagctctaccatggggcggacaatgtttttctggacggaacggttcagccatctgaccatcaaaagggctgccgcgccccacaaaatactgactgccggcacaataatgaacagcgggcgctgcatctcataccgctcattgcccgactgcacggtcatctgttccagacggcccgcatgggttgccagatatccctgaacccggtaaatggtatagaggcggtccagataatccggcgccccttcctccatctccagaaacgcatccctggcagcggcgtaattctcatacatatttaaaatggaccaggtgaccccataacggtccgcaccgatctcctcatagtcaaagggcagggacttaagcgcagagcgggtcctggcgcaggacatctcatatttctccctgttttcaggcgatctgtcccctgcataatactggaaggaactgctctcagcatccatggccgaccagaaggccaggctccgcgaattgcccataagcaaatccccgaatcccttcatgccatagccggcgatcagcatcaccgctgttatggacaggatgaccacggcagccgtggaaatggtaatccatctgaccttccgctccagggagcaggacatccaaataccatgcagttttcttccttgccttccttccatccagtctacctccatcgttcatagcttattctataatagtttttaacattttggaagagacaaaccaaaaacatggcggaactttgtatttttgcgcagcaaaaaacgcctgcagccagtaaggcagtctgtatttactgacataggcgttttcctgaggccgccggccgtaagccgcggaccatcacagcagctggtccttttcggaaggcacatacactgcaatatcctcaatatcgcagtccagtatcctgcaaaggtcattcacagtcttcatggatatgtccatgttgtgtttcagcctgtgaagggtactgtccgacacgcggtgcttctttgtaagtgtgtaccaattttcctcagattgctccagtgtcttccagaatggtgaataatctatcatctttatctcctgtatacgctcaagccgccaaagggctggtttcttagatagattaagcataagttagatttcacatcttgaatatcttcgcaattacgaatatactatataaatgtaaatgctgttatttacatatctgaaaggcagggcaaagcaaatggattatttcacaaaagaaggcatgaaaaagcttctggaggatgaagaggtagtccgccgtttgacggagttcatggccatggatggtgcggcctatttcgaggaggtgcgctcccatctgtcccctgaggagctggaagaatatctggatgagaacccggacgagagaatctatctgaaaaaataggtatccatccaatatttccatcacgtaaaagagcggcctgtcaaatgacaaaccgcccttcttcatcttcttcctcaaagtaatccttatagtccacctcaatagaacggcgcatacgtttcatgctgtaataaaggtgttccttcaaggcttcctccagccctttttcatttttatccgcaatcagacggaataaatcttcatgctcaccgataatgcgcataaaatcagtttccgtgataaagtccagcatcctgaacctggtatagtggagctgctgggcctgaagcatctcccacagcttctggcgcctgacagccgcaaaccagatggagtgcatctgcgcgtccatgcggtaaaactgctccggctcaaagcccggttccctgataacagccctctgctgcgcaatactgtggcggatgtcctccatgaccatgggcgtctggatttccaggaaatccctgagcaccatggtttccacggccacgcgcatatatatcatctgcttgatgttatccaggctcagaagagtcacataagtgccgcggtagggaatggtctctgcaaatccctgctcctgcaaaagccggagtgcgtcacgcaccggtgttctggacaccccaaagcgctcgcatatatcattttcactaatcatctggcccggcttaagccttaaatccaggatttcctgcttaagtgtctcgtatacaagctctccccggttcttgaagttcatctctcccatggctggaccccctaatcaatacccgcatacagcacaggcataaaatgccgctcttcctatcaaacagtccggccgcatcaaaagctgccggactgccaactggtctatattataaatgattcccccggaaaattcaagccggattatttaggctgcttgccgatgtatgccaggattcctccgtccacatacagcaccagtccattgacgaaattggatgcgtcggaagccaggaatacggcaggtccgcccagatcctcggcctcgccccagcgccctgccggagtcttgctcacgataaactggtcaaatggatgtctggagccgtcaggctgaatctcacgcagcggagcggtctggggagtggcaatgtaaccgggcccgatgccgttgcactggatgttgtactcgccgtactcggaagcaatgttcttggtcagcatcttaaggccgcccttggctgcggcgtatgcggatacggtctcacggccaagctcgctcatcatggagcagatgttgataatttttccgtggcccttcttaatcatgctggggataactgccttggacacgatgaacggcgcgttcaggtccacgtcaataacctgtctgaactcggcagccgtcatatcgcacataggaatcctcttgatgattccggcattgttcaccagaatgtccaccacgcctacttccttctcaatctttccaaccatctcgttgacggcgtcctcactggtcacgtcgcatacatagccgtgggcttcgattccctcttccttgtaagcagccagtcccttgtcaaccagctcctgcttgatatcattgaacacgatggttgcgcctgcgcctgccatggccttggcgatggcaaagccgattccgtaggatgcacctgtaatcagggctaccttgccctccagtgaaaagttatttaaataatctgccatttctttttcctccttgatttgcttatctcatctgattgggcatcatggtgtccatgtcgtcaaactccatgttctctccgcccatggcccagataaatgtatagttggatgtgccggctccgctgtgtatgctccaggaagggctgataacagcttcctcgttcttcatcacaatgtgccttgtctcggtgggctctcccatcatatggaataccacgttgtcgcctggaacctcaaagtacatataaacctccatgcggcgctcatgggtgtgggacggcatggtgttccatacgcttccctcctccagcacagtcatgcccatggacagctggcaggtcttaagtacatccgggtggataaactggttgataacgcgcttattggctgtctcagaagctccgcagggcctcttggctgcctttgcaatggggatgtaggtggtggtgtaagaagtatgggccggcgcgcttaccatgtagaacttagccggtgcagaagcatcgtcgctggaaaaatatacttcctttgttccctttgtgatgtacaggcagtccttatatcccatctggaattcctgtccgtcagccacaatcctgccgcttccgccgatattgaaaataccaatctcgcggcgctccagaaaatagtgagttccgaaattcttccagcagtcaattcccttatctatggaaacagtttctgtggtaggcatacatcccaatgtcaccatacgatccacatgtgaatacacagccactacctcattggccgcatacaggttctgaatcaggaactcatccctcagctcctgggtggtgtaacgctttacatccctctgatttgcagaatagcgaatatccattatcttgtttcctcctttaaacttgatttcctttaaatttagtttcctttaatctagattcctttaatcttgactttcttttgtgtttacatttgcctttgcgatttagattgcgtttgagtttgagtttgagtttgtatttctttctagaaacttgtatacaactttttaattctgtatacagattaacacagtcgtatatctttttcaatgggcatattctacaaaattgcagtgattttctatgcatgttcacaacagtaaggcttgcgttgtgtgtctgtttattatatacttgaccgtgtttgaccatgaaacattacagcgaggagaatgattatgaaaaaaaacatcctggtgggccagtccggcggccccacagccgtcattaacgccagcttatatggagtcattgcagagggcatggcccggccggaagaggtggaccatgtgtacggcatggtaaacggcgtcgaaggcttcctctcaggccacgtcatggacctgtcctctcttacccatgaggacctcatcctgcttaagcagactccggccgcttatctgggctcatgccggttcaaactgcctgaaaacctggatgcgccggtttacagccttttatttgaaaaattcaaatccatgaacataggagcctgtttctatatcggcggaaatgattccatggacacggttgacaagctctcacgatgcgcccggatccgccgtgaatccatctccttcatcggagtgccaaaaaccatagacaacgatctgcctgtgacagaccatacccccggatatggaagcgccgccaagtatgtggcctccacggtccgtgaaatttccctggacgcctctgtataccagcagccagctgtcactatcgtggaactgatgggacgccatgcaggctgggtaacggctgctgccgccctggccagaaaattccccggcgacaatcctcttctcatttatatgccggaagtgccgttctccatggaacagttttttaaggacgtggagcaggccctgtcccgccagcccaatgtggtaatctgcgtatccgaaggcatctgcgacaaaaacggccgttttatctgcgaatacaccaatgacgcccagattgacaccttcggccacaagatgcttaccggctgcgccaagatactggaaagctatgtccgcaaccgtttccaggtaaaggtccgctccgtggagctgaatgtaaaccagcgctgcagcagccttctggcctctgccgccgatgtgcaggaggcagagagctccggcagaacagctgtagaaaaggccctgcagggagaaaccggcaaaatggttacctgttcccgcctgtcagggcccggatatgaacttgaatatggacttacagaggtaggcaatgtgtgcaaccgcgaaaaatcctttcctgtggagtggatcacggcggaaggctccgatatcggaccggaattcctggactatgcccttcccctgattcaggggcagccggaccacatcatggaaaacggactgccaaaatatctctgcaggaagtaagcgcctcagccgtcacaccccggaatatgccgaaaatccgccgtccaccggaagtatgattccggtgataaaaccggccgcctcattgttgagcaggaacatgagggccccgttcagctcctcaggcctgccgaaccgccccatgggggtggcggccagcaccttggcggttctggccgcgggctttccgtcctcctcatagaggaggccctcattctgccgggtcacaaagaaacccggagcaatggcattgacccggattccggcttttgcgaaatgcacggccagccattgggtgaaattgctgagtgcggccacggccccgctgtatacaggtattctggtaaggggcctggccgcgctggcagaggagatgttgatgatattgcatccctcccgtcccaccatatccttggcaaagacctggcaggtcagaaatcctcctaaaaaattcaaatccagcacgccctgcacccccttatactccatatcaaagaaggtagccacatcggcctctatatcccccatctcaaaatattctttcgatgtattagccctggcctggttgcctcccgctccgtttatcaggatatcgcagggtcctaaccgggccagcaccctggcatgaacgctctccagcatctccttatccatcacatccactccataggcggcagccgtccccccagcctcccgtatgtccctggctgtctcctcagccgcctccaggttaatgtccagaagggccactgctgcgccggctctggccagcgtcctggcaaacatgccgcagaggattccccccgcgccggtcaccaccgccatctttcccgtcaaatccgtccccaataccacctttccttcctcccttcctgctctttactttcattcttttcccattcatcctcaccggctgatggacaaaaagggcctgagaacgttcttcccggccctttcctgatttatattgtgttttttgtctgattttgtgctgtacagaccggctgtcaggacattacctgctcattttctccacagcctcgaacaggccattgaggtaggtagcgcctaatgctctgtcatacaggccgtatccggctcttcctgtctctccccaaatcatacgtccgtggtcaggtcttacatagccgtcaaaaccattctccaccagggccttcacgataccgaacatgtccagggaaccgcagcaggacagatgtgctctttcctcaaagccgttatccagcacagccacatttctcagatgcgcgaagtggattcttcccatggcagcgtatttgccggccagtctaaccacgtcgttcttagcggaacagcccagggaaccggtacacagtgtgattccattgtgcctgtcatccaccagctttaaaaacttatccaggttctcctcacaggtaatgattctgggaagaccgaagatgctccagcatgggtcgtcctcatggattgccatattcacgtcgcactcggccgcaaccggaataatgcgctccagaaaatattttaagttatcccagagattttcctctgtcaggctgtggtattcctccactacagccttaagtccgtccttggtgtagctggaatcccatcccggaagtgtcaggtcgctgtcgctgttaagaggattcactgcatctacctgctcctgatagtacaccagggaggtggagccgtcagccagctcatggtctaactgggtcctggtccagtcaaatacaggcatgaaattgtagcagatacatttaacacctgcctccgcaacacggcggatgttctcacagtagttctcgatgtacttgtccctggaagccttgcccagctttatatcctcatggacaggaatactctcaatcacatcaaagcccaggccagcatcctctacctgcttcttcagctttgcaatgctctccctgctccacacttcgcctaccggaacatcgtatacagccgtaacgatggactgcatgcccggaatctggcggatattctccagtgttaccttgtcgtcttccccataccatctgaatgataatttcatgtgtaaactcctcctgataagtgttgttttacgttccctaacctatggttttattataacagaaaccatttttccgtccatagtgatacttgccgtccatattgcaaatgttgttgtttcatgctaagatggggataaaatcatgataaatcatgtttcccgagaggagggactcccgtgaaaaaacagctgtccatggactttaacacacggcaatacatgcagtccggagactttgaactcttctattacaatgacactgcgcttaaatccgtagatgcccatgaacatgactactacgagttctattttttcctggaaggcgatgttacataccacatcggtgataaaagctatcagctggaatacggggactgtctgctgattccgcctgataccccccattatccccagttccattcctatgataaaccctaccgcaggtttgtattctggctgaatcaggattaccacaaaaagctgcgccagaccaacgaagatttgacatattgttttgactatgcccagagccaccaggcctaccggttccacacagacaccattaccacccaggagattcagggaaagcttaccgacctgatggaggagcttgcgggcggacgctccttccaccgccttgtctcggagctcatggctgtctccttcctggtgtacattaaccgccttctctatgacagcctccaccagaaatcagctgtctacgaaaatgttctgtacctgaacatctgcgactatatcaaccggcacctggaggaggacttaagcctggacagcctgtcgtcctttttctatgtgagcaaataccatatctcccacatcttcaaggacaacatgggtatcccgctccaccagtacatcctgaaaaaacggcttcacgccagcaagaacgccatattgtccgaccagcccatcagccatgtttacctccagtacggcttcaaggactacaccagctttttcagggcattcaaaaaagagtacggtgtttcccccaaggagtaccgggagcagcaccgcctgcctgaacagcaggattacaccatataaggggatttgactgacatgaatacacctgacatcctttcctttgacacatacagaaactgtatcctctgccccagaatgtgcaaagccgaccgcagccgcgccgcaggctactgcggctgcagcagcgtccttacggctgccagggccgcccttcaccactgggaggagccctgcatcagcggatctgcggatgcagacggcggtttaacagcgccaggcggcgcccattcggattccggcggcagcggcaccgtctttttttccggctgtaccctgggctgctgcttctgccaaaatcataaaatcagcagcgggcatttcggccgggagatgaccgctgaggaactgggccaggttttcctccgtctccaggaccagggggcttataacataaacctggtgacacccacccagtacctgccccatattatctccgccctggaccaggtacgctttaagctcaccatacctgtggtctataactgcggcggctatgagcgtgcggagacagtaaaggcattaaaggattacgtggacatatggcttcccgacttcaagtactatgataaccgtctggcccagagatattccagggcttcggactattttgagacggccgctgccgccatccggcagatgattgaccagaccggcgctcctgtttaccagtctgtctctcccggactgctggcaaaaggtgtcatcatccgccacatggtcctgccgggacagcgccgtgattccattgccctgttggaatggataagcggcaatctgccccggggccggtatataatcagccttatgagccagtacactccctacatccaaaaccaggaattcccggaactaaaccgccgcattacatcatacgagtatgacaaggtggtggatgccgccatccgtctgggactcaccgagggcttcatgcaggaaaaaagcagtgccagggaagaatatactccgccctttgatttggaaggactataaggtattcgggacaaaggtattccggataaaagtattcgggacagatgaacgggtttcagaacaaaaaaagcgcctgcctcatccggctgcgctatcccgtttttcttttcccctgttctccaaacctgctctctaaagactttcctgaatctcataaaaacatgaagacggatatcgaatctttgactaaccacgttcgcagattacgatatccgtcttctaactatttcgtccattggactaaacctcacttttccgaaacaattcttttaattatttctggcttttctatattaagttgttacaccattctacgttctgttacttcgctcctacttctgcatttcttcacttatgtctgattcatttcttttattgctttttctttactatccggtatcatctttcgttctaataatactttctcgtcatatcaccaaaccgaatttatttttctgatactcttgagatagtgttacaaattcaatcattcatttgtttataaatgcttcactcaacagtctgtatctttaattcatatctttaaataactgcaattgctcttaaaacattcaatctatataacttgtatttcgattattaaattatctgtctgtgaacttacccattcacatattagtttctttaactcatgaaaacctgctacttcttgaattgtttaccaaccgattggattcctgtttctttaaatcaatttcttaaaattacttatctgtttgagcgtttcactttggtagattggtttttcctggtctcatttataattaaatttctttaagttataaatgaaacaaaatttaagtctttggcggtccgtacctcctttgcttggattttattacttgtgaactgattgtctacagttccttgaaatcttttgttctctgttcttttgttgttttcattatagtaaatgcccccgcatttgtcaatacctttttagtctttttattatttttttagtttattaataatttaatccattttattacaattgtttctatttttatacatatcttaaccttttatttgtgttaattgtttaaatattctgattttttccaaaaaaagatacctattcctaccggatacaggtatctttttcctgttatttactttttatttgtttgaatcatcccttaaatgcttccacttcttccctggagggtatggagggtgctgccccggggcgtgaaaccgcaattgcggctgccttggcagccaggtcaagggcctctcccgcatccagcccctgcaccagcccgccaataaggaaaccggtaaatgtatcaccggcagccgttgtatccgccacaggaaccttatagattccctgtgtcaggattcgttggccgtccctgtaaagggagccgtctccgcccagtgtcagaactatctttgactccggaaatttgtcagaaagcttttggagcagctcctcaccgcttccctgctccccgcatatatctcctgcctcaatctcattcaacaggaaataatccacatattccaggggataggtactgattttatcgtccatgggagaagggttgaatacaagcaccatgcctttttcgcgggctctctccatgatatagccaatctcgctgatttcattctgcagtaccaggtagtcccccttctcaaagtggtccataaccccatccaccatttccctggtaatctgctggttggcgccgccgaagagaaggatgcagttgcccccgtcctttgccttctggataatggcatggccggtctttccatccagcacggatatatactccgtattcaccccggcttcctttaactggcgaatgagaaaatccccgtccccggtgccgatggcacctgcgtgccatacctctgccccgcttttactcagggcaatggactggtttaaccccttgccgcctgaaaacacatgcatttcttccgaggacatggtctcccctcccctgacaaagtggtccacactataggtgtaatctatgttcagtgaaccgtaattaagtatcttcatgattctccttctcctttccattcgtttgatttttattcttccggcaccatcttccccacatcctggggaatccgggtcaggtcccgctccacaatcagatatatcactgcatccggagggttctcctccaaaagcgaccggtcaaaggcctgccagtgataaaagtccacattggcaaagtaccggggcaggaaatccatgagggctgtgccgaaggaatcccgtataacggcaatccggcgcttatccggcgccccgggtgtacttgtatggacaatattcttatccccgtttacatcctgcaccgtgacctcaaggtcttcgtgatacccgcttacaagggcaatctggtcatcgcagtatttctcaggcaggtggaacagattggccaggtcacccggggctcccttgatataatccacctgcacatcctctatgggcagcggtgtccctcccaatgcctcaatgagcatctggcctgccgcgtatcctcctgcgctgttccagtgagtatccgtcttataataccacacataatcccggttcgtgttaaagtactccctggggtccagaaccgtcacatccgagtgctcccgtatgtaatcctccagctgtccgggccggtttccatcccagacccgcttatatgcatccggcatatattccctgtagattccttccttgttgggagcaatcatcatgagaaagggtatgccccggctctcataatatccggctgcctttatgatctgtccgccaatccaggcagcatcgtccgggtaaaagggctgtgttcccagggcatcataaaggctcatgcccccggcaaaaaagtaccagccatcctttcccacaatcacatcctgggaatccgcatagccgaacagctttaaattaatcatggaattcaggctcaggaacaggttcctgaatgccgcatggtcattgatataactgttgaccgcagacggatacgcctcatatgtatccggtgaaaacacgggaaactctgccaggttcctgttttccccggtgcctgtctggctgcctcccttcacaaaaggaaacagcaggttgggtatcagaagcagggcccagaaccccgcaatcataatcttcttcatcataggtgctgctctctttccgtatggactaaaatctgaaataaataaaggcttgataggtgctgctgaccataagcaacgttcccagcagcaaaagggctgccatcacagccacatccgctgcggtcacgttctcctcatcaaacagccgggctttgagacggggcatcagctgctggatgggcccgcagaataccactgccagcaccagcagaaacagaatgcggttatccgcaaaaatccgcggattccacagtcccttgctgggaatcagcattgcctttaacagtatttttccgttgtgcagggtatccacccgaaacagcagccagcccactgccaccgccccaagggtgtacagatgattcaggaacttcaggggatttttttctaaaatcctgccaatccacaggcgttccgccacaataagaatgccgtaatacacaccccagcatatgaagttcatgctggccccatgccacagtcccgttgccaggaataccaggaaaagattcacgcaggtgcgcgccagtcccttcctgttgcctcccagaggaatgtaaagatactgcctgaaccaggtggagagggagatatgccagcgcctccagaactcgctgacagaggccgacagatacggataattgaagttctctttgtaggtaaagccgaacatcctgcccaggccgatggccatgtcggagtacccggaaaaatcatagtaaatctggaagctgtacagaatcacggccagccataccgtaaccgtgcccagctgttccaggggcaggtcaaacatacggtccaccacctggccgaacatgttggcaaataccattttcttcaccaggccgtacacaaaacgcttaataccgtatgcgtgcatggacaggctctcctgccggttcccaatctgcggttccagctcatgatacttgacaatgggaccggaaagtatctggggaaacaaagagatgtacagcgccagacggaatacatttctctgggcgggattctccccgcggaaggtatcagccaggtaagagatggactggaaggtgtaaaatgatatgccgatgggcagcgcgatatcccttggagcaaagccctggcgccccagaagggacatggccagttccaggaagaaattgaaatatttaaaataccccaaaagccccaggttgaccaggatgctcaggataaatactgccttcttaagccccttcctttccccgcaaccatccagggccaggccaaacccgtagtttagcaggatggaaaggaccaccagaaccacataccgcggctcgccccagctgtaaaacacaaggctggccatgagcagaaccccatttttaagcttcctgcccggtgaaatatagtatatcagggccagggcaggaaggaaaaaccatacaaacgtcagtgaactaaacagcatatttaggaaaattccctttctatcaaagtttatcaatcatgtatcacaaagatgcaggctacatggagacagcgtcctgctttggtatcttgcgccgtatcttatggaatgtcaccatatgggcaatggctgtgatggcccatgagacaggataggacagatacagcacgtccagggaacggtatgccgcaaatacggtgaatacccagagtaccctgaatccgcatgcccctgtgagggatacaaacatggggatgatggaataccccagccctctcaggcttcccaccatgcagtccatgattccgcaaaggaaataggttgtgcagataatttccagcctgagcatcccgtagcgcagcacctccgggtctgaggaatagatatgcaaaagtccgtctcccgcagccacggctgtgagtcccaggattaaacccacggccgtcaccactcccaggcatatgtacatgattttattaatcctgctgtacttcctgccgcccagattctggctggtaaagctcaggttggtctggtacaccgcgttcattgccgtgtagacaaaaccctcgatgttggaggaggccgtgttcccggccatggcaatggagccgaaggagttgaccgaggactgaatcagtacattggatatggagaatatggctccctgcatgcctgcgggaagtccgatttttacgattcgtttcagcttcctggggtgaatccgcagctgctttaaatccagcttaagtgctcccggagcgctcatcaggctcctcaggaccagaaaagcggagatgtgttctgatatgaccgtggcccaggccacaccgtccactcccattcccagcaccaccacaaagaacaggttcaggcacacattcaccacgccggaagcaaagaggaaatacagaggtctcctggtatccccgatagcccgcagaatggctgcgccgaagttatagaccataagtaccggcatacccagaaagtatatcctcatatagaggaccgactggctcaggacgtcctcaggggttcccataaggcgcagcagcgggtttgccagaagaattcccagcacaaccaggataaagccgctcacaatgctggtggtcaccgccgtgtggacggtctcactgacatccttgtctttgcgggccccgtaataccgggccaccagcacattgacaccaactgagagtcccacgaatacattaattaataggttgataagcgaagatgtggatcccactgccgccagagccccgctgcctgcaaaacggcccaccacgatgatgtccgctgcattaaacagcagctgcaatatgcctgacagcatcaaaggaatggaaaataaaaggattttgcccagaagcgggccgcttgtcatgtcaatctcataagactttttcatcttctgttaactccctgtgtcattctttctccatgccagtccatggcatatgttcttatcagttatatcacagggccgcgttttttacaatgggttaaaaggccatgaaaacctgcgaattttcttgacatttcccggcccgtcctttaaaatggagcaagtgataagggagtaattggcatgccccgccctgccgggcatgtaataaggtcaacatactgatagtttctatctggctttatttgaaacaatgagacttatctacagcattccaaggctgtaggtgggtctttttttataccacaatccatatattaaaacatcaccagggaggaatcattatgtcattagctgaactgtttgtcatcgccgtggggctgtccatggacgcgtttgcggtatctgtctgtaagggcctggccatgcccaaaatgaactggaagggcgcccttttggttgggctgtacttcggcggattccaggccgccatgcctttgttcggatatttcctgggttccagcttcagcctggccatacgtgcttacgaccactgggtggccttcatcctgctggctgttatcggcgcaaacatgataaaagaatccttcagcaaagacgaggaatgtccgaacgcggacctggatgttaaaaacatggtgcttctggccattgccaccagcatagatgccctggccgtgggcgtgacctttgccttcctgaatgtcgacatccttcccgccgtatcctttatcggaagcgtcaccttctttctgtccgtggccggcgtaaaggcaggcaacgcatttggatgccgctataaatccaaggccgagctggcaggcggcgccatcctcattctcatgggattcaagatactgctggagcacctgggaattttgttcgggtaagcgaaacataagtatccggcagaccatccttaccttcccattccgccatacctgcgcaaagacggcggggcagcgtcctctcggaatacgctgccccactgtcttttatattgtccttttcctgtctcaaatcctgttcccaggctcagaaacttaagccttcccggtctcagattctgacgccgctgctgtccagctggtaaccgtcaatggtgcggttcgtctgcatcactccgttttcagggtccatataataccactgtcccttatattccagccagccggtctgcatatagccgtctgtgttgaaaaaataccacttgtcgtttatcatggcccaggatgtaaggtattcatcctgatacagatacctccagccgcgcatatccttgttccatttgcccagcaggatgttccggtagttgctcatgtcctcctcaggaagcagcatgaaataccggctctcctttttatcctgataacaaaactctaccatataacattgatccagataattataatccccctcagcggaccgctctttttcaacggtctcaggccggattacagggtaatgggtcccttcctttaaaccgtacaccgtacactccagatacttctgggtctcgcccctataggtgacaagataataattcagtgtcacttcattcaggtccacatcacttttgtcctttgtaactgtgaacgtatcgtattccgataccctgtaccccagcagataggacgaatatccgtcataaatcgtggtccttctgctgttaacatccaaatgcagggtaacaggcacctcagtcttatacgaagccgctgcctctgagacaaatgcagccgacacactgataactgccgccagaaccagcgcgcctaaccgcttaacagacatataccgtctcatccggtaccctcctctcaaacctttggactactcatgatgacatccagggtgaattcccggcgcatccgccagccattatttcaatataatcttcttgaaattcttcttgccgcgcttaacgaccacgccatctccggcaaactgttccctggagaatacggccttgatatcctttacaggatttccgtccacggacacaccgccctgttccacgttccttctggcctcagaacgggaagctgccaggccggacttgttaagaatgcttaagatatcaatggttccatctgtaaaatcctcttctgaaagttcaaaagtaggcatgttctcggtgctcgctcctgccgcaaacagggccctggcgccttcctgcgccttggctgcttcttcctcgccgtgcaccagctttgtaagctcgaatgccagtatctcctttgcctggtttaactggcttccttcccactgatccatctcgtcaatctgctccagcggaaggaaggtaagcatgcgcaggcacttaagcacatcggaatcccccacattcctccagtactggtagaaatcaaagggtgatgtcttctcaggatccagccatactgcgccggactgtgtcttacccatcttcttgccctcagaattcagaagcagggtaatggtcatggcatgtgcatccttgcccagcttgcggcgaatcagttctgttccgcccagcatgttgctccactggtcatcgccgccaaactgcatgttgcagccgtaccgtttgaacagctcatagaagtcatagctctgcataatcatgtagttgaattccaggaagcttaagcccttttccatcctctgcttgtagcattcagcccgcagcatgttgttgacggaaaaatgtggtcccacttccctgaggaactcaatatagttaaggctcatgagccactccgcattgttcaccatcatggcctttccctctgagaaatcaatgaaacggctcatctgctttttaaaacagtcacagttatgctggatgatttcaggcgtcatcatggtgcgcatatcagatcgtcccgacgggtcgccaatcatgcccgtgcctccgccaatcagggcaatcggcttgttgcctgccatctgaagacgcttcatcaggcagagcgccataaagtggcctacatggaggctgtcagctgtcgggtcaaagccgatatagaatacggcctttccctcgttgaccattttcttaatttcttcttcgttggtcacctgggcaataaggcctctggcaaccagttcttcataaatctgcatggtgattctctcctcttcttactttctttattttaccatacttctgctttcatgcaagggcttgattcttacattttttatacaggggcagcaggggcacagggcataccgccgacacgattttccctttctgaacgaaaaaaagccccgccctttctcaaaaggacgaagcccgtaagccccgtgttaccacctgatgttcacagacagctcacgctgcctgcctcttcgagtactggcgccaggctctggccaaacgcccgtatactctagcacgataacggatgcaggacccgtcgcagcctactaaggctgttatatgaagcagcgctgttgggtgcgaagctcagggatgtattcatgacctgctttccatgcgcctctcatcatccggctgctttctgtctgttcctgcaggctactacttgttcccgtcatagccaattcatgaaattatgaccattatagacagactctcccggtttgtcaagagttaatcagccatatgcaaagggaatcagcagccgtatgcaaagggaatcagcggtgtgcaaaggtaagcacgaacacagctcccagtatcagggcaaatcccagaaaatcaggcagcgtaaaccgggttcccagccagaacacggatataaccaccgcggataccggctccacgcttcccatgatgctgccctttaagggtccaatcatgctgacgccctgaaggtacaggccaaatgcaatggcagtgcccaccaccaccacgcctgccagcgctcccagtgtacctgcatcccagaccaccccgtaattccagggctgaaccacggctcccatggcaatcccgccaaaaaacatgccgaatcccagcacctggtatatgtcatatttcaggataagacctcctggtataatagtataaatcatggagctcacagctgccaaaagcccccagaacagggcctcccccgtaatgtggaaggaatgtatgtccccatgggttccgatgacaaaggtgccaaacaaagacagcccgatggctgccagctcaagccccttgggaagccgcagctcccgcatgcacaccactgccagaatcagaatgggcgacaggtactggagtacggttgccgttcccgcgttggatgcctggattgccataaaatatgtaaactggcagaaagtaatgccgaaaatagcaaatgccagcaagtggatggtatccctttttttccggaacaccctcagattctccctgccgtgaagcttaaatcctgccagcaccagtataatgcctgcaaaaaacagcctgacagccaccagccacggcgcctcgattcccttctgttcaaacaaatactgcccgcagcagcccgaaaatccccagcaggttccgcctaccagggccattatggttcccgctgtctgtctcttatcattcttcatctcacacgttaatctcctgcaacagtcatgtatctatttatacttggaaaacaccttattgtcaatattttcgtgggattcactatttacgaatccggttttctatactataatgaagcattgaaatgtatcttacaccgcagtccggtgtttacataatgggaggacgaaaaaatgggattcacattcatcaataagctgcctacgccggcagaaatccgggagcaattcccgctggccccagagctggcagaaatcaaacacgcacgggacgaggaaataaaaagggtatttaccggtgaaagcggcaagtttgttgtcatcatcggcccctgctcagctgacaacgaggaatctgtatgtgattacgccggacgccttgtgaaaatccaggaaaaaacaaaggacaagctaattattattccccgggtctacaccaacaagcccagaaccaccggcgagggatatatgggaatgatacatcagcccgatcctgagaagcggcctgatatgtttgaaggaattctggctatccgccatatgcacatgagggtgctgcgggagacaggtttctccactgcagatgaaatgctttatcctgaaaacatgaactatctctcagacatgatgtcctatgtggcggtaggcgcccgttccgtggagaaccagtttcaccggctggtagccagcggctgcgatgtgcccgtaggcatgaagaaccctaccagcggcgacctgacagtcatgctgaattccgtggtggctgcccagcttccccacgactttatcttccgcggctttgaagtgcagtgccccggcaatcctctgacccacactatcctgcggggggctgtaaacaagaggggccagtgcaaccccaactaccactatgaagatttgaagcttttatttgacctttataataagcgcgggttacagaatcctgcctgcatcgtggataccaaccacgccaactccaacaagcagtaccatgaacaaattcgtatagccaaggaagtgctccacagccgccgccactccggcgatatcaagaatctggtaaagggccttatgattgagagctacattgagcccggcagccagaaaatcggggaacactgctacggcaagtccatcaccgatccctgcctgggatgggatgatacggagcggctgctgtacgagattgcggataatctggactagcaccatactataacccaaacgaaatatgagcccggaaaagggcctgccatgcgttttgcatggcaggcccttt

SEQ ID NO: 3184 - DNA, 8860 bp, Unknown
  gut microbiota DNA sequence
tatttttaataatttatggtataccaaaatactatcatccctttcagcaaatgtcaattgtacactcctctgtttcgatatactactttaaatataacgaatacagtatacggcagtccggtctatgaaccgtatttaacggttcttcctgatttatgccgggttactgtcataggcatctttcacaaacagttgttaaacaaaattatttattatttttccatttcgtctaacatttcataaataaaaattgagattttctggcttttatattataataaaagaaatgcgaatgcagacaaccgctgtctgcatatgacaaaggaggaaacaatcatgggtttgtttcagcataaaaaagaaaaagggacagcagagcttccgcctacaccgcctgtccttacccccactgaaccggatgctgccagcgagggccgcgcagcctgcatgaacaggctggagtccgtactgggcgccccttcgtccaagggagtggttctaaaactctatctggagaattttaagagtctgaataagacgttcggatatgattactgtgaggagcttctttcccagataaaaagctatctgaaggaagtggctgagggcaatatctaccgttacataggtgtggaattcatcattatattggaacagctttcagaagggaaggcctgcgacctggctgatgagattctggaacgcttcggaaacgtttggaaaatccgcggcgtggactgtctgtgttccgcacagataggtctctgctcctaccccggtcatgccaccagcacagatgagctgcttaagcgcctggacctggccgtgtctgctgcctctgactgcggacccaaccagatggcagtatatgacagcaacatgcatacccagttcgtccgccgccaggctgttgccatgtaccttcagacagccctggaaaagaatgagctggaggtccgctaccgtcccacctataacctgaaggaaggccgctttacaagggctgattcctatatgagaatattcattcagggcatcgggctggtgggcgcagctgagtttatgcccatagccgaggattcaggccagatcagggccattggctactacgccctggaccatgccggcagatgcatcagcgaactgatgaatacgggaagggaatttgactccatctgtatccctgtttccccggtgcttcttgtacaggaggattttctggatcaggtcacaaaggtccttgagacctaccagatacccaagggcaagctggccctggaggtggatgacagcgccctgtccaatgtatatctgaacgtaaacatcaccatgcaggagctctccgacatgggtgtggagctggtactcaacaacttcggttccggatgcgctcctgtcagcagtatcctggaccttcccatcaatacagtaaagctggagcgcatgtttgtatggcagctggagaccaatccaaaatcagcctccattgcaggcggactgattcagattgccagggaactgggtatccatatcatcgctgagggtgtggagacagagaaccagctgaacgcactgaacaactatcagtgcgagtatcagcagggcttctactacgctcccaccatggagcaggacgtgctcataaaggtcatgggaactacgctggatgagtccagggttaccattgaggaagagaagcttaaaatgaagatgtaacaataatccttgcaggaaataaatgcaagaaaacgcaggttccgttttaacggttcctgcgttttgcattgttattgttatcattatcagatattgtattacggcttccactgggcataaatggattcattgattcctgaatgtatggtcagctcactgtgtccatcctttaccagcttaaccctcctgttgccatacaggaagcagcgctcctgcactatctggttcatattggcaaacaactcctcatagatatccgtaatttctccacctatgtaaatgtattcagggtccatcatggtaatcagaacagaaatcaatctgcccaaatatccggcggtctcgtgaatcagatgaacggccttttcatcctctttctttgcgtctgcaaccagctgattccaggcccccaggacatcctcctgttcctctcccctatattccgccacgatatcaggaatggcaagttcattctcaatacatccatacgccccgcattcagaacagtatttacggggatttcccagcggcgtatgggccacctcaccgccatacccgtgatgcccccttaacagggaaccttcgcatataattccgacgcccactccctcagagatatggaggtagacaagatttctgcactccgcaatggtatgcttaaggcttaaggcacagagattggcctcattatcaacatagcccggaagctggaaggctttctctacaatggctttgagaggtacgccctcatacatctttaccgcacagtttacaagtgtctgagtagccaaatcaaagattcctgaaacagccacccccacaccgatgtacacgtgattggagttttcccttgcaatctcatcaaatcttttcctggcgtagtcaataacctcctcaggggcgtccaaaccagatatatcatatttttgatggaacacaatctcatttctgatattcagcaccgcaattcccagcacacctttcatctgcaggttcagacacaccgtacagaacctgttatatgccagattaaccgtggatggagtccttcctaccgacatggagttttttttaacgatttcaacaattcccctctccaataactcattgcacagattggaaaccgtggcaaagctcaatgctgttctgtcagctatatcacgctttgtaagaccgctctcccctgctgaaaacctcagcacattcacaatactcttaacattgtgctgtttaatatccattacgtccaaagattccatcgttttctccatctatcctcttaatttactgctggaggattctgatattttgccaatacggcctcgtcctttaacatctcacctgtcagcaatgagctgcctccgtagatgataggaggaacatgtccaaatggcggatttgctgatgggatttctgtgggatgtgccgctgcatatgccagcatcatcgcctcatacccaatcagatatgggtcatccacgattgtcccttcaatatccccagcctgcagcagttcaatgaccgctgaactgtaatcacttccaattataacaatattttctaaaatattcaatgttctagctgccgctgccgctcctggcgccccatatccatgggtactgaatattcccttaatctgagggttggcctgaaacagagccgcgcatacggtttccgactttgcaacgtctccctcatcgtttaattcggatacaacctgaacccccggcgcattctcagccagccattccttaaaacctgctgccctctcttcctgggcaatggagcccggaaccagacatatggcgacctgtccctctcctccaatcatctcagacatggcttttgctgcattggctccaaaatcatagttatctgtgcccacataggacagcctgccgctgtcagcagcatcactgtcaaaaccaatcacaggaactccggcacttagtgcttttcctatggccgaattcaaggttgtctcatctgccgcggataccagtattcctgctggtttcttggccgtcacctgttccactgcccttgcttccagcgacgcatcccactccgcaggtccctgaagctccactgttatatgacttccaagcagctttgccgcatccttcatacctgcgtagcaccagttgaaatattccgctccctttgtaaagaccaccatggagtacagttcattttccctggcagcagatgaatcctgtccggccggcgccgctgcctttgatgtttcgctgctgcatcccgctacacttgccagcataattccagccatacacaatgcgattattttcttcatgtaattctcctccttttatgaatgcctcttttttaatatgttcatcccctcgctcatcagcactgccgcaatcagaaacgctcccgtcaccacatcctgataatacgtggaaatcccgctcatgacaaatgcattgtaaatcatggccatgaacagtgtccccagcaaggttcctgtaaccgatccatatcctccgtgggtcaggcttgtcccgcctattgccactgttgtgattactctcaggtccgcattggtgccatagctgtagcttgcgctgctgtaggtcatggctgtcaggattccggctgccgctgccagaacagcagatatgatgtatacattccggtataccccttccacctttattccggacagacgggccgcttcttcatttccgcccacaaaatatatctgctggaatgattttttgtttttagaaaagtaaataaaaacagctgccagcaggatgtacacaatccagctcaaaggcattcctgctatcctgcgtgtactccaggctgaaaatccttctgaaaaattagaaatcgcgcttccgccggtaagtgtcagattcagtccctttaaaactgccgcaatggccattgtcactaccatgggatgcagattcagcttttttctaaaaaggtttgtcaggcaaccaatccccgctgccgctgccagaaccagcattatagctgccgcaaatggaactccccgtatcatgaacagcgcaagaatgatagaagaaaaaggaaggacacctgccacagtcagatcaattcccccggatataattaccagggtcatccccaaagccatgattgcctccatgatgaaattatccaccagtacacaaagattggctgctgtaaagaaataaggcgaacgaaaccccatgaaaaccgcaagaagtacgataaggaaaatcagtaccatataatgaaggttgatttttttagccatttccttccacctcctcccggaacgccgccttcatcacaatctcttctgtcagattgtcattctccaatacggcctggcatttgccctcatgcattacaatgactttatccgatactcccaggatttccggcagttcagaagaaatcatccacacagccatcccgctgtctgccagccttcgcagtatttcatgaatcattgccttagcgcccacatccacgcctctggtaggttcatccacaatcagcagctttggattggcagcaagccattttgcaaagagtaccttctgctgattaccccctgacagattggataatctgttttccatacactgtgtaggatgtatttccagttcttcaatatacgtttttgttatacttctgctcttatcctcctttatgaattgtataggactgcatatggatttaagacaggctgcaatcgtgttttcccgtacagtcatgtcaacaaatagtccgattgccttgcggtcctctgacaggtaacacacgcccgctttgattgcctgagccggattggaaaaccttacttccttatcctcaaaaaacacctttcccgaatcaatcttgtccgccccgaaaatcgaaaacgcacattctgtccgtcctgccccaaccaacccaaacattccggcaatttcaccatatcggatatcaaaggaaacatgttcaaatttatactttctgctgatactctctgccctgagagcacattttccgtttctgtcctttgctttcggaggatatagattatcaatattgcgtcctaccatcatcctgattatggtctgtacatccatgttttcccttgtcagagtccctgtgcatgtcccgtccctcagtaccgataccttatcggaaatccttgtaatttcatttaatttgtgacttatgaaaataatcagctttcctttttccctcaagtcaaataacagacggaacaggttctcgatttctttgtcagaaagagcgctggtaggttcatccaaaatcagtatgttaacgtcctttgacaataccttcgtaatttctatcatctgctgcaggccgacgctcaaggttccggcctgaacccttggattgatgttagcaccgattttccggaactcttcctctgtatttttatagagacggtcccaatctataaaccccagcctgttgacaggttcattattgacaaatacattctgggccacagtcatattccctgcaatgcttaattcctgatgtacgattcctattccatgggcataagcctccaccggattcctcatggttatgttccgtccgtccaggagtacttctccactgtcagcctggtatatacctccgattattttcatcagggtcgattttcctgctccgttctcaccgataatagagtgaatctcccctttttcaaaatcaatggagatattttccagtactttgttatttccaaaagactttactacattttttacttgtaaataactcatacccttctcctatctcggttttcttcttcggcgcagggcatcaaaagccaccgccgccagaagcataaggccgcttattgcagatgaccagttaggcgaaccgttaaacatgataaatacgttatttaccagggccactaatatgactccgagagcagttcccagaaagcttcccgccccgccatgcatatcagcgccgcctataactgccgcagaaatcgccttcatctcaaaggaaatgccataacctgcatggcccatacccaggctgctggtcatcagtatcgcagcaattcctgccatgaggccgctaatcatgtagcccaggataatcgtaagtccagacggaatacctgaaataaatgccgcctgcctgttgcctcccacgtaaaacatgctgcgcaggggtctgaaacgtcttgataaaagggccagcaaaagcataatggtgattgataccaatatcttattaggtactccaagcagacttcctctccctatattggtataggcgtcagtcaaccctgccacgaaataaccgctggtcagcacataacaggctccccggcaaatagactgacttccaagagtcgccacaaagggagctacattggctttggacacaagaataccattaaccgcacctatcgcacccccaaaaagaatgcccaggcctactgcaagcactatgtttatacctttttgaatcattaaggtacagatgattccagacagcgcaaggactgctcccacagacaggtccaccccgcccaatataatgacaaaggtcattccgcaggccagcagcaaatcataggcaagattggaaaatatggcttcaatgttgcttctggcatagaaaagttctcctttaagaatacacattgcaacaaaaataactgcaattgtaatgattaacgttccttccctgttattgacagacagtttcattttgtctttcattcacatcacatccctctgcctaccagctcctgaacatccaccggcatatcagaacacttgacagcagttcttccccgctttatatatgcgtcctcaacacagcctccggcaatctcggtatttggataaccgtaacatccaagatccagcataatacctacgttctcaccatacggttcttccttgtccggggtgatgaccattggttccaaacactccgtcagtccggttccatgacatgtactataaaaatgaaactgcttcatattacgccctccgatttcctgtgaggcaaaataattcctggccgccaggtcaatgcggttggaaggaagattcccctggcaaacatgatagatttcctgttccgcccttcggtaagcttcattcatgcagtcaaaatatgctttctgaagttcgcttctctttcccataacaaaagaccttctgcatacgcccttataaccctcaaagctgggactgcagccaatctgcacgatttctccttcctctatcactttgtttgaggctggtccaatcacggttttgcaccggtcacctgaatttacaattgtatcaaacccaaatccggttcccccaagggatttgactgtaaagtctcctactgccgccacttcgctttccctgattcccggcctgacaactgccagcatggctcttactgctgcgcaggcaatgatatctgcctgttccatacacttaaactcattctctgatttttcataccggaggtcagacaggatatcggaagcatccaccacttccacttttccaaaactcgtatggaggaattccatgaattttgccggaatgatatcatcacttgtcatataaccgattcgtttgatttcgtgtcctatgtaacgggcaatgacttcattcagctcatccctgtccactccttcataatattcatcgggtatgctgaattcgtttacaaaacgggtgtccaatcccaatccggattcttttgaaaggataccggattcaggtccggccagaagaagaggacgttttccgggagcaatcaccccgctggctctttcgatggttgggttatatccagtcagataaataccatcccccggcatctctctgtaccagaagaaaaatcccatatcaatttttttctcatccagcttcttccatacattctgataccgctcctcatattctttctgcggaatcttaaaatccttatcaatgcgtccctcatacgccctcacgattcccataaccctctcaaaatccattgcgctaatacccataactacctccttcatttatttgtgcattttttatattaaactaattattataatacttattataattattatataaatatttgtcaatactgcggggggattagaacatgattt
